(19) United States
(12) Patent Application Publication
(10) Pub. No.: US 2011/0172165 A1
(43) Pub. Date: Jul. 14, 2011

(54) MODIFIED LINKERS

(76) Inventors: Peter Artymiuk, Sheffield (GB); Richard A. Ross, Sheffield (GB); Jon Sayers, Chesterfield (GB)

(21) Appl. No.: 12/867,747

(22) PCT Filed: Feb. 18, 2009
(86) PCT No.: PCT/GB2009/000437

§ 371 Date: Dec. 7, 2010

(30) Foreign Application Priority Data
Feb. 19, 2008 (GB) 0802978.7
Nov. 19, 2008 (GB) 0821076.7
Jan. 14, 2009 (GB) 0900539.8

(51) Int. Cl. A61K 38/14; C07K 14/52; C07H 21/04; C12N 15/63; C12N 5/10; C07K 14/535; C12N 1/00; C07K 14/55; C07K 14/555

(52) U.S. Cl. 514/20.9; 530/395; 536/23.2; 435/320.1; 435/325; 530/351; 435/419; 435/243

(57) ABSTRACT

We describe modified peptide linkers that function to link at least first and second polypeptides wherein said modified peptide linker comprises a motif for the addition of a sugar moiety.

[0001] The invention relates to modified peptide linkers that function to link at least first and second polypeptides wherein said modified peptide linker comprises a motif for the addition of a sugar moiety.

[0002] Glycosylation is the addition of a sugar pendent group to a protein, polypeptide or peptide which alters the activity and/or bioavailability of the protein, polypeptide or peptide. The process is either co-translational or post-translational and is enzyme mediated. Two types of glycosylation exist; N-linked glycosylation to an asparagine side chain and O-linked glycosylation to a serine or threonine amino acid side chain. N-linked glycosylation is the most common post-translational modification and is carried out in the endoplasmic reticulum of eukaryotic cells. N-linked glycosylation can be of two main types; high mannose oligosaccharides which are two N-acetylglucosamines and complex oligosaccharides which include other types of sugar groups. A peptide motif contained in glycosylated polypeptides is Asn-X-Ser or Asn-X-Thr where X is any amino acid except proline. This is catalyzed by the enzyme oligosaccharyl transferase (OT); see Yan & Lennarz J. Biol. Chem., Vol. 280 (5), 3121-3124 (2005) OT catalyzes the transfer of an oligosaccharyl moiety (Glc3Man9GlcNAc2) from the dolichol-linked pyrophosphate donor to the side chain of an Asn. A pentasaccharide core is common to all N-linked oligosaccharides and serves as the foundation for a wide variety of N-linked oligosaccharides.

[0003] O-linked glycosylation is less common. Serine or threonine residues are linked via their side chain oxygen to sugars by a glycosidic bond. Usually N-acetyl glucosamine is attached in this way to intracelluar proteins.

[0004] It is known that glycosylation alters the function of biologically active proteins. For example, WO01/36001 describes a modified interferon y conjugate comprising an N-linked glycosylation which is purported to have improved pharmacokinetics (PK) and reduced immunogenicity. WO2004/020578 discloses N-linked glycosylation of IL-20 genetically engineered variants that preferentially signal through IL20 receptor. WO2005/070138 describes O-linked glycosylation of therapeutic peptides, for example G-CSF that are not typically glycosylated to reduce immunogenicity and improve bioavailability. Further examples of glycosylated G-CSF are disclosed in

[0005] WO2007/108882 which is expressed in transgenic cells and which alters the G-CSF glycosylation pattern. WO2007/022799 describes a process for manufacturing recombinant glycosylated interferon in serum free conditions to provide a differentially glycosylated protein when compared to native glycosylated interferon β and which is manufactured at elevated amounts. WO2007/084441 discloses Follicle Stimulating Hormone mutants with increased glycosylation which have improved PK and its use in the treatment of fertility. WO2007/136752 discloses processes for the homogeneous glycosylation of erythropoietin, a protein that contains four carbohydrate chains; three N-linked glycosylated sites and one O-linked. A problem associated with the production of glycosylated recombinant protein is the heterogeneity in glycosylation. Further examples of attempts to improve the PK of erythropoietin are described in WO00/32772, WO01/02017 and WO03/029291.

[0006] In our co-pending application WO01/96565 we described fusion proteins with improved PK and agonist activity which are fusions of cytokines to the extracellular domains of their cognate receptors. The cytokine and extracellular domains are linked to one another via a flexible peptide linker that allows the respective domains to move relative to each other. An example is growth hormone (GH).

[0007] GH binds sequentially with two membrane bound growth hormone receptors (GHR) via two separate sites on GH referred as site 1 and site 2. Site 1 is a high affinity binding site and site 2 a low affinity site. A single GH molecule binds 1 GHR via site 1. A second GHR is then recruited via site 2 to form a GHR:GH:GHR complex. The complex is then internalised and activates a signal transduction cascade leading to changes in gene expression. The extracellular domain of GHR exists as two linked domains each of approximately 100 amino acids (SD-100), the C-terminal SD-100 domain (b) being closest to the cell surface and the N-terminal SD-100 domain (a) being furthest away. It is a conformational change in these two domains that occurs on hormone binding with the formation of the trimeric complex GHR-GH-GHR. GH chimeric fusion proteins administered to rats have a 300-times reduced clearance compared to native GH and single administration promoted growth for 10 days far superior to that seen with native GH. The growth hormone fusion forms a reciprocal, head-to-tail dimer that provides a reservoir of inactive hormone as occurs naturally with GH and its binding protein. A further example is disclosed in our co-pending application WO03/070765 which describes modified GH fusion proteins that include modifications to site 1 and site 2 in GH and which act as antagonists of GH receptor activation.

[0008] Further examples of novel chimeric fusion proteins are described in unpublished patent applications directed to: growth hormone (US60/951,122; 0717985.6); modified growth hormone (UK0719818.7; US60/979,010) leptin (UK0715216.8; US60/956,360); erythropoietin (UK0715126.9; US60/956,319); granulocyte colony stimulating hormone (UK0715133.5; US60/956,303); interferon (UK0715383.6; US60/956,343); interleukin UK0715557.5; US60/956,372; IGF-1 (UK0715213.5; US60/956,333) and prolactin (UK0724654.9; UK 0724656.4); and peptide hormone chimeras (UK0725201.8); the contents of which is incorporated by reference in their entirety.

[0009] In WO03/034275 we described fusion proteins comprising oligomers (e.g. dimers, trimers) of cytokines, for example growth hormone and leptin, which act as agonists of receptor mediated signal transduction. The cytokine moieties are also linked to one another via flexible peptide linkers. The oligomers although active do not have the improved PK when compared to chimeric fusion proteins.

[0010] Peptide linker molecules that link polypeptides are known in the art. For example, WO2006/010891 describes rigid and semi-rigid peptide linker molecules that link amongst other proteins growth hormone in tandem which comprise peptides with helical regions to restrict flexibility. In EPO 573 551 is described a serine rich peptide linking molecule (Ser Ser Ser Ser Gly)ₓ (wherein is x can be between 1-10 copies) useful in linking domains in fusion proteins and single chain antibody fragments to improve solubility and resist protease digestion. In WO88/09344 a glycine rich linking molecule is described (Gly Gly Gly Gly Ser) that links heavy and light chain antibody fragments. Peptide linking molecules are therefore established as a means by which polypeptide domains can be linked to one another to form functional complexes that have improved activity and/or PK.

[0011] We disclose a modified peptide linking molecule that is modified to include a motif for the attachment of sugar moieties thereby forming a glycosylated peptide linker between at least two active polypeptide binding moieties.

[0012] According to an aspect of the invention there provided a fusion polypeptide comprising first and second polypeptides linked indirectly by a peptide linker wherein said peptide linker is modified to include at least one motif for the addition of at least one sugar moiety.

[0013] In a preferred embodiment of the invention said first polypeptide is a ligand and said second polypeptide is a cognate receptor to which said ligand can bind; preferably the extracellular domain comprising or consisiting a domain that binds said ligand.

[0014] In an alternative preferred embodiment of the invention said ligand is a chemokine.

[0015] The term “chemokine” refers to a group of structurally related low-molecular weight factors secreted by cells having mitogenic, chemotactic or inflammatory activities. They are primarily cationic proteins of 70 to 100 amino acid residues that share four conserved cysteine residues. These proteins can be sorted into two groups based on the spacing of the two amino-terminal cysteines. In the first group, the two cysteines are separated by a single residue (C-x-C), while in the second group they are adjacent (C-C). Examples of member of the ‘C-x-C’ chemokines include but are not limited to platelet factor 4 (PF4), platelet basic protein (PBP), interleukin-8 (IL-8), melanoma growth stimulatory activity protein (MGSA), macrophage inflammatory protein 2 (MIP-2), mouse Mig (m119), chicken 9E3 (or pCEF-4), pig alveolar macrophage chemotactic factors I and II (AMCF-I and -II), pre-B cell growth stimulating factor (PBSF),and IP10. Examples of members of the ‘C-C’ group include but are not limited to monocyte chemotactic protein 1 (MCP-1), monocyte chemotactic protein 2 (MCP-2), monocyte chemotactic protein 3 (MCP-3), monocyte chemotactic protein 4 (MCP-4), macrophage inflammatory protein 1 α (MIP-1-α), macrophage inflammatory protein 1β (M1-1-β), macrophage inflammatory protein 1-γ (MIP-1-γ), macrophage inflammatory protein 3 α (MIP-3-α, macrophage inflammatory protein 3 β (MIP-3-β), chemokine (ELC), macrophage inflammatory protein-4 (MIP-4), macrophage inflammatory protein 5 (MIP-5), LD78 β, RANTES, SIS-epsilon (p500), thymus and activation-regulated chemokine (TARC), eotaxin, I-309, human protein HCC-1/NCC-2, human protein HCC-3.

[0016] In a further preferred embodiment of the invention said ligand is a pro-angiogenic polypeptide.

[0017] A number of growth factors have been identified which promote/activate endothelial cells to undergo angiogenesis. These include vascular endothelial growth factor (VEGF A); VEGF B, VEGF C, and VEGF D; transforming growth factor (TGFb); acidic and basic fibroblast growth factor (aFGF and bFGF); and platelet derived growth factor (PDGF). VEGF is an endothelial cell-specific growth factor which has a very specific site of action, namely the promotion of endothelial cell proliferation, migration and differentiation. VEGF is a complex comprising two identical 23 kD polypeptides. VEGF can exist as four distinct polypeptides of different molecular weight, each being derived from an alternatively spliced mRNA. bFGF is a growth factor that functions to stimulate the proliferation of fibroblasts and endothelial cells. bFGF is a single polypeptide chain with a molecular weight of 16.5 Kd. Several molecular forms of bFGF have been discovered which differ in the length at their amino terminal region. However the biological function of the various molecular forms appears to be the same. bFGF is produced by the pituitary gland.

[0018] In a preferred embodiment of the invention said pro-angiogenic polypeptide is selected from the group consisting of: VEGF A, VEGF B, VEGF C, VEGF D, TGFb, aFGF and bFGF; and PDGF.

[0019] In a further preferred embodiment of the invention said ligand is a growth factor.

[0020] Insulin-like growth factor 1 (IGF1) and its cognate receptor IGF1R are, in combination with human GH, essential for normal growth and development. Additionally IGF1R has also been implicated in malignant transformation (Baserga et al 1997). The IGF1, IGF2 and insulin receptors are closely related and IGF1R can also be activated by IGF2. IGF1 R consists of an alpha chain of approximately 740 residues disulphide linked to a transmembrane beta chain (90kDa) which includes the cytoplasmic tyrosine kinase domain. Two alpha chains are disulphide linked so that the receptor forms an alpha2:beta2 tetramer on the membrane (Hubbard and Till, 2000). The alpha chain consists of several domains: two L domains, L1 (residues 1-150) and L2 (residues 300-460) are largely responsible for binding the hormone; the L domains are separated by a Cys-rich domain (151-299), and followed by fibronectin Type III domains (460-700) (Baserga R, Hongo A, Rubini M, Prisco M & Valentis B (1997) “The IGF-1 receptor in in cell growth, transformation and apoptosis” Biochim Biophys Acta 1332: F105-F126); Hubbard S B & Till, J H (2000) “Protein tyrosine kinase structure and function.” Annu. Rev. Biochem. 59:373-398).

[0021] In a preferred embodiment of the invention said ligand is insulin-like growth factor 1.

[0022] In a preferred embodiment of the invention said ligand is human insulin-like growth factor 1 and is represented by the amino acid sequence in FIG. 1.

[0023] In a preferred embodiment of the invention said receptor domain comprises or consists of an IGF-1 receptor polypeptide as represented by the amino acid sequence in FIG. 2.

[0024] In a preferred embodiment of the invention said ligand is insulin-like growth factor 2.

[0025] In a preferred embodiment of the invention said ligand is human insulin-like growth factor 2 and is represented by the amino acid sequence in FIG. 3.

[0026] In a preferred embodiment of the invention said receptor domain comprises or consists of an IGF-2 receptor polypeptide as represented by the amino acid sequence in FIG. 4a or 4b.

[0027] In a preferred embodiment of the invention said ligand is a cytokine.

[0028] Cytokines, are involved in a number of diverse cellular functions. These include modulation of the immune system, regulation of energy metabolism and control of growth and development. Cytokines mediate their effects via receptors expressed at the cell surface on target cells. Cytokine receptors can be divided into three separate sub groups. Type 1 (growth hormone (GH) family) receptors are characterised by four conserved cysteine residues in the amino terminal part of their extracellular domain and the presence of a conserved Trp-Ser-Xaa-Trp-Ser motif in the C-terminal part. The repeated Cys motif is also present in Type 2 (interferon family) and Type III (tumour necrosis factor family).

[0029] In a preferred embodiment of the invention said cytokine is selected from the group consisting of: growth hormone; leptin; erythropoietin; prolactin; interleukins (IL) IL-2, IL-3, IL-4, IL-5, IL-6, IL-7, IL-9, IL-10, IL-11, the p35 subunit of IL-12, IL-13, IL-15; granulocyte colony stimulating factor (G-CSF); granulocyte macrophage colony stimulating factor (GM-CSF); ciliary neurotrophic factor (CNTF); cardiotrophin (CT-1); leukocyte inhibitory factor (LIF); interferon type I, II or III.

[0030] In a preferred embodiment of the invention said interferon is a type I interferon.

[0031] Preferably said type I interferon is selected from the group consisting of: interferon α, interferon β, interferon ε, interferon κ and ω interferon.

[0032] In a preferred embodiment of the invention said interferon a is selected from the group consisting of: IFNA 1, IFNA 2, IFNA 4, IFNA 5, IFNA 6, IFNA 7, IFNA 8, IFNA 10, IFNA 13, IFNA 14, IFNA 16, IFNA 17 and IFNA 21.

[0033] In an alternative preferred embodiment of the invention said first polypeptide is interferon β and said second polypeptide comprises an interferon β binding domain of an interferon receptor.

[0034] In a preferred embodiment of the invention said fusion polypeptide comprises an amino acid sequence as represented in FIG. 27, 28, 29, 30 or 31.

[0035] In an alternative preferred embodiment of the invention said cytokine is selected from the group consisting of: growth hormone; leptin; erythropoietin; prolactin; and G-CSF.

[0036] In a preferred embodiment of the invention growth hormone is a human growth hormone polypeptide.

[0037] Preferably said human growth hormone polypeptide is represented by the amino acid sequence presented in FIG. 5.

[0038] In a preferred embodiment of the invention said growth hormone polypeptide is a modified human growth hormone polypeptide which is modified in at least one receptor binding domain.

[0039] In a preferred embodiment of the invention said receptor binding domain of growth hormone is a site one binding domain.

[0040] In an alternative preferred embodiment of the invention said receptor binding domain of growth hormone is a site two binding domain.

[0041] In a preferred embodiment of the invention said modified growth hormone is modified in both site one and site two.

[0042] In a preferred embodiment of the invention said site two modification is to glycine 120 of the amino acid sequence as represented in FIG. 5.

[0043] In a preferred embodiment of the invention said site two modification is a substitution of glycine for an amino acid selected from the group consisting of: arginine; alanine; lysine; tryptophan; tyrosine; phenylalanine; and glutamic acid.

[0044] In a preferred embodiment of the invention said substitution is glycine 120 for arginine or lysine or alanine. Preferably said substitution is glycine 120 for arginine.

[0045] In a preferred embodiment of the invention said receptor domain comprises or consists of a growth hormone receptor polypeptide as represented by the amino acid sequence in FIG. 6.

[0046] In a preferred embodiment of the invention leptin is human leptin and represented by the amino acid sequence presented in FIG. 7.

[0047] In a preferred embodiment of the invention said receptor domain comprises or consists of a leptin receptor polypeptide as represented by the amino acid sequence in FIG. 8.

[0048] In a preferred embodiment of the invention erythropoietin is human erythropoietin and is represented by the amino acid sequence presented in FIG. 9.

[0049] In a preferred embodiment of the invention said receptor domain comprises or consists of an erythropoietin receptor polypeptide as represented by the amino acid sequence in FIG. 10.

[0050] In a preferred embodiment of the invention prolactin is human prolactin and is represented by the amino acid sequence presented in FIG. 11.

[0051] In a preferred embodiment of the invention prolactin is a modified human prolactin wherein prolactin is modified in at least one receptor binding domain.

[0052] In a preferred embodiment of the invention said modified prolactin polypeptide comprises an amino acid sequence wherein said amino acid sequence is modified at position 129 of human prolactin as represented in FIG. 11.

[0053] In a preferred embodiment of the invention said modification is an amino acid substitution. Preferably said substitution replaces a glycine amino acid residue with an arginine amino acid residue.

[0054] Preferably said modification further comprises the deletion of at least 9, 10, 11, 12, 13 or 14 amino terminal amino acid residues of the amino acid sequence as represented in FIG. 11.

[0055] In a preferred embodiment of the invention said receptor domain comprises or consists of a prolactin receptor polypeptide as represented by the amino acid sequence in FIG. 12.

[0056] In a further preferred embodiment of the invention G-CSF is human G-CSF and is represented by the amino acid sequence presented in FIG. 13.

[0057] In a preferred embodiment of the invention said receptor domain comprises or consists of a G-CSF receptor polypeptide as represented by the amino acid sequence in FIG. 14.

[0058] In a preferred embodiment of the invention said ligand is a peptide hormone.

[0059] In a preferred embodiment of the invention said peptide hormone is selected from the group consisting of: anti-diuretic hormone; oxytocin; gonadotropin releasing hormone, corticotrophin releasing hormone; calcitonin, glucagon, amylin, A-type natriuretic hormone, B-type natriuretic hormone, ghrelin, neuropeptide Y, neuropeptide YY₃-₃₆, growth hormone releasing hormone, somatostatin; or homologues or analogues thereof.

[0060] In a preferred embodiment of the invention said fusion protein comprises growth hormone releasing hormone.

[0061] In an alternative preferred embodiment of the invention said fusion protein comprises somatostatin or homologue or analogue thereof; preferably somatostatin is somatostatin 14. Alternatively somatostatin is somatostatin 28.

[0062] In a preferred embodiment of the invention said fusion protein comprises the amino acid sequence: AGCKNFFW KTFTSC.

[0063] In an alternative preferred embodiment of the invention said fusion protein comprises the amino acid sequence: SANSNPAMAPRERKAGCKNFFW KTFTSC.

[0064] In a preferred embodiment of the invention said receptor binding domain is an extracellular receptor binding domain.

[0065] In a preferred embodiment of the invention said receptor binding domain comprises a somatostatin binding domain of a somatostatin 1 receptor.

[0066] In a preferred embodiment of the invention said receptor binding domain comprises a somatostatin binding domain of a somatostatin 2 receptor. somatostatin binding domain of a somatostatin 3 receptor.

[0067] In a preferred embodiment of the invention said receptor binding domain comprises a somatostatin binding domain of a somatostatin 4 receptor.

[0068] In a preferred embodiment of the invention said receptor binding domain comprises a somatostatin binding domain of a somatostatin 5 receptor.

[0069] In a preferred embodiment of the invention said extracellular receptor binding domain comprises or consists of a somatostatin binding domain.

[0070] In a preferred embodiment of the invention said extracellular receptor binding domain comprises or consists of a somatostatin binding domain as illustrated by the amino acid sequence in FIG. 15 with reference to table 1.

[0071] In an alternative preferred embodiment of the invention said first polypeptide and said second polypeptide is somatostatin 14.

[0072] In a preferred embodiment of the invention said fusion polypeptide comprises an amino acid sequence as represented in FIG. 32, 33, 34, 35 or 36.

[0073] In a further alternative preferred embodiment of the invention said first and said second polypeptide is somatostatin 28.

[0074] In a preferred embodiment of the invention said fusion polypeptide comprises an amino acid sequence as represented in FIG. 38, 39, 40 or 41.

[0075] In an alternative preferred embodiment of the invention said first polypeptide is somatostatin 14 and said second polypeptide is somatostatin 28.

[0076] In a preferred embodiment of the invention said fusion polypeptide comprises an amino acid sequence as represented in FIG. 42 or 43.

[0077] In an alternative preferred embodiment of the invention said fusion polypeptide comprises of the follicle stimulating hormone (FSH) a subunit.

[0078] In a preferred embodiment of the invention said fusion polypeptide comprises or consists (FSH) a subunit as represented by the amino acid sequence in FIG. 16.

[0079] It is noted that the FSH α subunit is common to the hormones luteinising (LH) hormone and thyroid stimulating hormone (TSH) and therefore a claim to FSH α subunit is equivalent to a claim to LH and FSH. It is the β subunit of the respective hormones that confers receptor specificity.

[0080] In a further alternative preferred embodiment of the invention said fusion polypeptide comprises or consists of the follicle stimulating hormone (FSH) β subunit.

[0081] In a preferred embodiment of the invention said fusion polypeptide comprises or consists of the follicle stimulating hormone (FSH) β subunit as represented by the amino acid sequence in FIG. 17.

[0082] In a preferred embodiment of the invention said fusion polypeptide comprises or consists of the extracellular domain of follicle stimulating hormone receptor (FSHR).

[0083] In a preferred embodiment of the invention said fusion polypeptide comprises or consists of the extracellular domain of follicle stimulating hormone receptor (FSHR) as represented by the amino acid sequence in FIG. 18 with reference to Table 2.

[0084] In an alternative preferred embodiment of the invention said fusion polypeptide comprises or consists of the LH β subunit.

[0085] In a preferred embodiment of the invention said fusion polypeptide comprises or consists of the LHR subunit as represented in FIG. 19.

[0086] In a preferred embodiment of the invention said fusion polypeptide comprises or consists of the extracellular domain of the LH receptor.

[0087] In a preferred embodiment of the invention said fusion polypeptide comprises or consists of the extracellular domain of the LH receptor as represented in FIG. 20 with reference to Table 3.

[0088] In a preferred embodiment of the invention said fusion polypeptide comprises or consists of a TSH β subunit.

[0089] In a preferred embodiment of the invention said fusion polypeptide comprises or consists of the amino acid as represented in FIG. 21.

[0090] In a further preferred embodiment of the invention said fusion polypeptide comprises of the extracellular domain of the TSH receptor.

[0091] In a preferred embodiment of the invention said fusion polypeptide comprises or consists of the extracellular domain of the TSH receptor as represented in FIG. 22 with reference to Table 4.

[0092] In an alternative preferred embodiment of the invention said first and second polypeptides are ligand binding domains that bind receptor polypeptides wherein said domains are linked in tandem.

[0093] In a further preferred embodiment of the invention the binding domains of the polypeptide are the same or similar to each other.

[0094] In an alternative preferred embodiment of the invention said ligand binding domains are dissimilar.

[0095] In a further preferred embodiment of the invention at least one of the domains comprises a growth hormone binding domain.

[0096] In a preferred embodiment of the invention said fusion polypeptide comprises first and second growth hormone polypeptides.

[0097] In a preferred embodiment of the invention said fusion polypeptide comprises an amino acid sequence as represented in FIG. 23, 24, 25 or 26.

[0098] In a further preferred embodiment of the invention said polypeptide comprises at least two binding domains of growth hormone, or a growth hormone variant.

[0099] In an alternative preferred embodiment of the invention said polypeptide comprises at least two binding domains of prolactin, or a prolactin variant.

[0100] In a preferred embodiment of the invention said prolactin variant polypeptide comprises an amino acid sequence wherein said amino acid sequence is modified at position 129 of human prolactin.

[0101] In a preferred embodiment of the invention said modification is an amino acid substitution. Preferably said substitution replaces a glycine amino acid residue with an arginine amino acid residue. Preferably said modification further comprises the deletion of at least 9, 10, 11, 12, 13 or 14 amino terminal amino acid residues.

[0102] In an alternative embodiment of the invention the binding domains of the polypeptide are dissimilar to each other.

[0103] In a preferred embodiment of the invention said polypeptide comprises a first binding domain that is a growth hormone binding domain and a second binding domain that is a prolactin binding domain.

[0104] Preferably said polypeptide consists of a growth hormone binding domain and a prolactin binding domain.

[0105] In an alternative preferred embodiment of the invention said polypeptide comprises a first binding domain that is a modified growth hormone binding domain and a second binding domain that is a modified prolactin binding domain.

[0106] Preferably said polypeptide consists of a modified growth hormone binding domain and a modified prolactin binding domain.

[0107] In a preferred embodiment of the invention said modified growth hormone binding domain comprises an amino acid susbstitution at amino acid position glycine 120.

[0108] Preferably, said modification is a substitution of glycine 120 for an amino acid selected from the group consisting of arginine, lysine, tryptophan, tyrosine, phenylalanine, or glutamic acid.

[0109] In a preferred embodiment of the invention said modification is the substitution of glycine 120 with an arginine amino acid residue.

[0110] In a further preferred embodiment of the invention said modified prolactin binding domain comprises a modification of glycine 129. Preferably said modification is the substitution of glycine 129 with an arginine amino acid residue. Preferably said modification further comprises the deletion of at least 9, 10, 11, 12, 13 or 14 amino terminal amino acid residues.

[0111] In an alternative preferred embodiment of the invention said first and second polypeptides comprise antibody variable region binding domains.

[0112] In a preferred embodiment of the invention said antibody variable region binding domains bind the same or a similar epitope.

[0113] In an alternative preferred embodiment of the invention said antibody variable region binding domains bind dissimilar epitopes and are bivalent.

[0114] Various fragments of immunoglobulin or antibodies are known in the art, i.e., Fab, Fab2, F(ab′)2, Fv, Fc, Fd, scFvs, etc. A Fab fragment is a multimeric protein consisting of the immunologically active portions of an immunoglobulin heavy chain variable region and an immunoglobulin light chain variable region, covalently coupled together and capable of specifically binding to an antigen. Fab fragments are generated via proteolytic cleavage (with, for example, papain) of an intact immunoglobulin molecule. A Fab2 fragment comprises two joined Fab fragments. When these two fragments are joined by the immunoglobulin hinge region, a F(ab′)2 fragment results. An Fv fragment is multimeric protein consisting of the immunologically active portions of an immunoglobulin heavy chain variable region and an immunoglobulin light chain variable region covalently coupled together and capable of specifically binding to an antigen. A fragment could also be a single chain polypeptide containing only one light chain variable region, or a fragment thereof that contains the three CDRs of the light chain variable region, without an associated heavy chain variable region, or a fragment thereof containing the three CDRs of the heavy chain variable region, without an associated light chain moiety; and multi specific antibodies formed from antibody fragments, this has for example been described in U.S. Pat. No 6,248,516. Fv fragments or single region (domain) fragments are typically generated by expression in host cell lines of the relevant identified regions. These and other immunoglobulin or antibody fragments are within the scope of the invention and are described in standard immunology textbooks such as Paul, Fundamental Immunology or Janeway et al. Immunobiology (cited above). Molecular biology now allows direct synthesis (via expression in cells or chemically) of these fragments, as well as synthesis of combinations thereof.

[0115] It is possible to create single variable regions, so called single chain antibody variable region fragments (scFvs). If a hybridoma exists for a specific monoclonal antibody it is well within the knowledge of the skilled person to isolate scFv's from mRNA extracted from said hybridoma via RT PCR. Alternatively, phage display screening can be undertaken to identify clones expressing scFv's. Alternatively said fragments are “domain antibody fragments”. Domain antibodies are the smallest binding part of an antibody (approximately 13 kDa). Examples of this technology is disclosed in U.S. Pat. No. 6,248, 516, U.S. Pat. No. 6,291,158, U.S. Pat. No. 6,127,197 and EP0368684 which are all incorporated by reference in their entirety.

[0116] In a preferred embodiment of the invention said antibody fragment is a single chain antibody variable region fragment.

[0117] In a preferred embodiment of the invention said polypeptide comprises or consists of an amino acid sequence selected from the group consisting of the sequences represented in FIG. 46a, 46b, 46c, 46d, 46e or 46f.

[0118] In a preferred embodiment of the invention said polypeptide comprises or consists of an amino acid sequence selected from the group consisting of the sequences represented in FIG. 47a, 47b, 47c, 47d, 47e or 47f.

[0119] In a preferred embodiment of the invention said polypeptide comprises or consists of an amino acid sequence selected from the group consisting of the sequences represented in FIG. 48a, 48b, 48c, 48d, 48e or 48f.

[0120] In a preferred embodiment of the invention said polypeptide comprises or consists of an amino acid sequence selected from the group consisting of the sequences represented in FIG. 49a, 49b, 49c, 49d, 49e or 49f.

[0121] In a preferred embodiment of the invention said polypeptide comprises or consists of an amino acid sequence selected from the group consisting of the sequences represented in FIG. 50a, 50b, 50c, 50d, 50e, 50f or 50h.

[0122] In a preferred embodiment of the invention said polypeptide comprises or consists of an amino acid sequence selected from the group consisting of the sequences represented in FIG. 51a, 51b, 51c, 51d, 51e, 51f or 51h.

[0123] In a preferred embodiment of the invention said polypeptide comprises or consists of an amino acid sequence selected from the group consisting of the sequences represented in FIG. 52a, 52b, 52c, 52d, 52e, 52f or 52h.

[0124] In a preferred embodiment of the invention said polypeptide comprises or consists of an amino acid sequence selected from the group consisting of the sequences represented in FIGS. 53a, 53b, 53c, 53d, 53e, 53f or 53h.

[0125] In a preferred embodiment of the invention said polypeptide comprises or consists of an amino acid sequence selected from the group consisting of the sequences represented in FIG. 54a or 54b.

[0126] In a preferred embodiment of the invention said polypeptide comprises or consists of an amino acid sequence selected from the group consisting of the sequences represented in FIG. 55a or 55b.

[0127] In a preferred embodiment of the invention said polypeptide comprises or consists of an amino acid sequence selected from the group consisting of the sequences represented in FIG. 56a or 56b

[0128] In a preferred embodiment of the invention said polypeptide comprises or consists of an amino acid sequence selected from the group consisting of the sequences represented in FIG. 57a or 57b.

[0129] In a preferred embodiment of the invention said polypeptide comprises or consists of an amino acid sequence selected from the group consisting of the sequences represented in FIG. 58a, 58b, 58c, 58d, 58e or 58f.

[0130] In a preferred embodiment of the invention said polypeptide comprises or consists of an amino acid sequence selected from the group consisting of the sequences represented in FIG. 59a, 59a, 59b, 59c, 59d, 59e or 59f.

[0131] In a preferred embodiment of the invention said polypeptide comprises or consists of an amino acid sequence selected from the group consisting of the sequences represented in FIG. 60a, 60b, 60c, 60d, 60e or 60f.

[0132] In a preferred embodiment of the invention said polypeptide comprises or consists of an amino acid sequence selected from the group consisting of the sequences represented in FIG. 61a, 61b, 61c, 61d, 61e or 61f.

[0133] In a preferred embodiment of the invention said polypeptide comprises or consists of an amino acid sequence selected from the group consisting of the sequences represented in FIG. 62a, 62b, 62c, 62d or 62e.

[0134] In a preferred embodiment of the invention said polypeptide comprises or consists of an amino acid sequence selected from the group consisting of the sequences represented in FIG. 63a, 63b, 63c, 63d or 63e.

[0135] In a preferred embodiment of the invention said polypeptide comprises or consists of an amino acid sequence selected from the group consisting of the sequences represented in FIG. 64a, 64b, 64c, 64d or 64e.

[0136] In a preferred embodiment of the invention said polypeptide comprises or consists of an amino acid sequence selected from the group consisting of the sequences represented in FIG. 65a, 65b, 65c, 65d or 65e.

[0137] In a preferred embodiment of the invention said polypeptide comprises or consists of an amino acid sequence selected from the group consisting of the sequences represented in FIG. 66a, 66b, 66c, 66d, 66e or 66f.

[0138] In a preferred embodiment of the invention said polypeptide comprises or consists of an amino acid sequence selected from the group consisting of the sequences represented in FIG. 67a, 67b, 67c, 67d, 67e or 67f.

[0139] In a preferred embodiment of the invention said polypeptide comprises or consists of an amino acid sequence selected from the group consisting of the sequences represented in FIG. 68a, 68b, 68c, 68d, 68e or 68f.

[0140] In a preferred embodiment of the invention said polypeptide comprises or consists of an amino acid sequence selected from the group consisting of the sequences represented in FIG. 69a, 69b, 69c, 69d, 69e or 69f.

[0141] In a preferred embodiment of the invention said polypeptide comprises or consists of an amino acid sequence selected from the group consisting of the sequences represented in FIG. 70a, 70b, 70c, 70d, 70e, 70f, 70g, 70h, 70i, 70j, 70k, 70m, 70n, 70o and 70p.

[0142] In a preferred embodiment of the invention said polypeptide comprises or consists of an amino acid sequence selected from the group consisting of the sequences represented in FIG. 71a, 71b, 71c, 71d, 71e, 71f, 71g, 71h, 71i, 71j, 71k, 71m, 71n, 71o and 71p.

[0143] In a preferred embodiment of the invention said polypeptide comprises or consists of an amino acid sequence selected from the group consisting of the sequences represented in FIG. 72a, 72b, 72c, 72d, 72e, 72f, 72g, 72h, 72i, 72j, 72k, 72m, 72n, 72o and 72p.

[0144] In a preferred embodiment of the invention said polypeptide comprises or consists of an amino acid sequence selected from the group consisting of the sequences represented in FIG. 73a, 73b, 73c, 73d, 73e, 73f, 73g, 73h, 73i, 73j, 73k, 73m, 73n, 73o and 73p.

[0145] In a preferred embodiment of the invention said polypeptide comprises or consists of an amino acid sequence selected from the group consisting of the sequences represented in FIG. 74a, 74b, 74c, 74d, 74e, 74f, 74g, 74h, 74i, 74j, 74k or 74m.

[0146] In a preferred embodiment of the invention said polypeptide comprises or consists of an amino acid sequence selected from the group consisting of the sequences represented in FIG. 75a, 75b, 75c, 75d, 75e, 75f, 75g, 75h, 75i, 75j, 75k or 75m.

[0147] In a preferred embodiment of the invention said polypeptide comprises or consists of an amino acid sequence selected from the group consisting of the sequences represented in FIG. 76a, 76b, 76c, 76d, 76e, 76f, 76g, 76h, 76i, 76j, 76k or 76m.

[0148] In a preferred embodiment of the invention said polypeptide comprises or consists of an amino acid sequence selected from the group consisting of the sequences represented in FIG. 77a, 77b, 77c, 77d, 77e, 77f, 77g, 77h, 77i, 77j, 77k or 77m.

[0149] In a preferred embodiment of the invention said polypeptide comprises or consists of an amino acid sequence selected from the group consisting of the sequences represented in FIG. 78a, 78b or 78c.

[0150] In a preferred embodiment of the invention said polypeptide comprises or consists of an amino acid sequence selected from the group consisting of the sequences represented in FIG. 79a, 79b or 79c.

[0151] In a preferred embodiment of the invention said polypeptide comprises or consists of an amino acid sequence selected from the group consisting of the sequences represented in FIG. 80a, 80b or 80c.

[0152] In a preferred embodiment of the invention said peptide linker molecule is a flexible peptide linker.

[0153] In a preferred embodiment of the invention said peptide linker molecule comprises or consists of one copy of the glycosylation motif Asn-Xaa-Ser or Asn-Xaa-Thr where X is any amino acid except proline.

[0154] In a preferred embodiment of the invention said peptide linker molecule comprises at least 5 amino acid residues.

[0155] In a preferred embodiment of the invention said peptide linker comprises 5-50 amino acid residues.

[0156] In a further preferred embodiment of the invention said peptide linker consists of 5, 10, 15, 20, 25, 30, 35, 40, 45 or 50 amino acid residues.

[0157] In a preferred embodiment of the invention said peptide linker molecule comprises at least one copy of the motif (Xaa₁ Xaa₂ Xaa₃ Xaa₄ Xaa₅) wherein said motif comprises the glycosylation motif Asn-Xaa-Ser or Asn-Xaa-Thr.

[0158] In a preferred embodiment of the invention said peptide linker comprises at least one copy of an amino acid motif selected from the group consisting of: Asn₁-Xaa₂-Ser₃ Xaa₄ Xaa₅ wherein Xaa₂ is any amino acid except proline; Xaa₁ Asn₂-Xaa₃-Ser₄ Xaa₅ wherein Xaa₃ is any amino acid except proline; Xaa₁ Xaa₂ Asn₃-Xaa₄-Ser₅ wherein Xaa₄ is any amino acid except proline; Asn₁-Xaa₂-Thr₃ Xaa₄ Xaa₅ wherein Xaa₂ is any amino acid except proline;

[0159] Xaa₁ Asn₂-Xaa₃-Thr₄ Xaa₅ wherein Xaa₃ is any amino acid except proline; and

[0160] Xaa₁ Xaa₂ Asn₃-Xaa₄-Thr₅ wherein Xaa₄ is any amino acid except proline.

[0161] Preferably said peptide linker comprises at least one copy of a motif selected from the group consisting of:

[0162] Asn₁-Xaa₂-Ser₃ Gly₄ Ser₅ wherein Xaa₂ is any amino acid except proline;

[0163] Asn₂-Xaa₃-Ser₄ Ser₅ wherein Xaa₃ is any amino acid except proline;

[0164] Gly₂ Asn₃-Xaa₄-Ser₅ wherein Xaa₄ is any amino acid except proline;

[0165] Asn₁-Xaa₂-Thr₃ Gly₄ Ser₅ wherein Xaa₂ is any amino acid except proline;

[0166] Gly, Asn₂-Xaa₃-Thr₄ Ser₅ wherein Xaa₃ is any amino acid except proline; and

[0167] Gly₂ Asn₃-Xaa₄-Thr₅ wherein Xaa₄ is any amino acid except proline.

[0168] In an alternative preferred embodiment of the invention said peptide linker comprises at least one copy of a motif selected from the group consisting of:

[0169] Asn₁-Xaa₂-Ser₃ Ser₄ Gly₅ wherein Xaa₂ is any amino acid except proline;

[0170] Ser₁ Asn₂-Xaa₃-Ser₄ Gly₅ wherein Xaa₃ is any amino acid except proline;

[0171] Ser₁ Ser₂ Asn₃-Xaa₄-Ser₅ wherein Xaa₄ is any amino acid except proline;

[0172] Asn₁-Xaa₂-Thr₃ Ser₄ Gly₅wherein Xaa₂ is any amino acid except proline;

[0173] Ser₁ Asn₂-Xaa₃-Thr₄ Gly₅ wherein Xaa₃ is any amino acid except proline; and

[0174] Ser₁ Ser₂ Asn₃-Xaa₄-Thr₅ wherein Xaa₄ is any amino acid except proline.

[0175] In a preferred embodiment of the invention said peptide linker molecule comprises at least one copy of the motif (Xaa₁ Xaa₂ Xaa₃ Xaa₄ Xaa₅) wherein said motif comprises the glycosylation motif Asn-Xaa-Ser or Asn-Xaa-Thr and at least one copy of the motif (Gly Gly Gly Gly Ser) wherein said peptide linker is 5-50 amino acids.

[0176] In a preferred embodiment of the invention said peptide linker comprises at least one copy of the motif (Xaa₁ Xaa₂ Xaa₃ Xaa₄ Xaa₅) wherein said motif comprises the glycosylation motif Asn-Xaa-Ser or Asn-Xaa-Thr and a copy of the motif (Ser Ser Ser Ser Gly) wherein said peptide linker is 5-50 amino acids.

[0177] In a preferred embodiment of the invention said fusion polypeptide linker is modified by the addition of at least one sugar selected from the group consisting of: mannose, galactose, n-acetyl glucosamine, n-acetyl neuraminic, acid n-glycolyl neuraminic acid, n-acetyl galactosamine, fucose, glucose, rhamnose, xylose, or a combinations of sugars, for example in an oligosacharide or scaffolded system.

[0178] Suitable carbohydrate moieties include monosaccharides, oligosaccharides and polysaccharides, and include any carbohydrate moiety that is present in naturally occurring glycoproteins or in biological systems. For example, optionally protected glycosyl or glycoside derivatives, for example optionally-protected glucosyl, glucoside, galactosyl or galactoside derivatives. Glycosyl and glycoside groups include both a and β groups. Suitable carbohydrate moieties include glucose, galactose, fucose, GlcNAc, GalNAc, sialic acid, and mannose, and oligosaccharides or polysaccharides comprising at least one glucose, galactose, fucose, GlcNAc, GalNAc, sialic acid, and/or mannose residue.

[0179] Any functional groups in the carbohydrate moiety may optionally be protected using protecting groups known in the art (see for example Greene et al, “Protecting groups in organic synthesis”, 2nd Edition, Wiley, New York, 1991, the disclosure of which is hereby incorporated by reference). Suitable protecting groups for any —OH groups in the carbohydrate moiety include acetate (Ac), benzyl (Bn), silyl (for example tert-butyl dimethylsilyl (TBDMSi) and tert-butyldiphenylsilyl (TMDPSi)), acetals, ketals, and methoxymethyl (MOM). Any protecting groups may be removed before or after attachment of the carbohydrate moiety to the peptide linker.

[0180] In a preferred embodiment of the invention said sugars are unprotected.

[0181] Particularly preferred carbohydrate moieties include Glc(Ac)₄β-, Glc(Bn)₄β-, Gal(Ac)₄β-, Gal(Bn)₄β-, Glc(Ac)₄α(1,4)Glc(Ac)₃α(1,4)Glc(Ac)₄β-, β-Glc, β-Gal, -Et-β-Gal,-Et-β-Glc, Et-α-Glc, -Et-α-Man, -Et-Lac, -β-Glc(Ac)₂, -β-Glc(Ac)₃, -Et-α-Glc(Ac)₂, -Et-α-Glc(Ac)₃, -Et-α-Glc(Ac)₄, -Et-β-Glc(Ac)₂, -Et-β-Glc(Ac)₃, -Et-β-Glc(Ac)₄, -Et-α-Man(Ac)₃, -Et-α-Man(Ac)₄, -Et-β-Gal(Ac)₃, -Et-β-Gal(Ac)₄, -Et-Lac(Ac)₅, -Et-Lac(Ac)₆, -Et-Lac(Ac)₇, and their deprotected equivalents.

[0182] Preferably, any saccharide units making up the carbohydrate moiety which are derived from naturally occurring sugars will each be in the naturally occurring enantiomeric form, which may be either the D-form (e.g. D-glucose or D-galactose), or the L-form (e.g. L-rhamnose or L-fucose). Any anomeric linkages may be α- or β-linkages.

[0183] According to a further aspect of the invention there is provided a nucleic acid molecule that encodes a polypeptide comprising a peptide linker capable of being glycosylated.

[0184] According to a further aspect of the invention there is provided a vector comprising a nucleic acid molecule according to the invention.

[0185] In a preferred embodiment of the invention said vector is an expression vector adapted to express the nucleic acid molecule according to the invention.

[0186] A vector including nucleic acid (s) according to the invention need not include a promoter or other regulatory sequence, particularly if the vector is to be used to introduce the nucleic acid into cells for recombination into the genome for stable transfection.

[0187] Preferably the nucleic acid in the vector is operably linked to an appropriate promoter or other regulatory elements for transcription in a host cell. The vector may be a bi-functional expression vector which functions in multiple hosts. By “promoter” is meant a nucleotide sequence upstream from the transcriptional initiation site and which contains all the regulatory regions required for transcription. Suitable promoters include constitutive, tissue-specific, inducible, developmental or other promoters for expression in eukaryotic or prokaryotic cells. “Operably linked” means joined as part of the same nucleic acid molecule, suitably positioned and oriented for transcription to be initiated from the promoter. DNA operably linked to a promoter is “under transcriptional initiation regulation” of the promoter.

[0188] In a preferred embodiment the promoter is a constitutive, an inducible or regulatable promoter.

[0189] According to a further aspect of the invention there is provided a cell transfected or transformed with a nucleic acid molecule or vector according to the invention.

[0190] Preferably said cell is a eukaryotic cell. Alternatively said cell is a prokaryotic cell.

[0191] In a preferred embodiment of the invention said cell is selected from the group consisting of; a fungal cell (e.g. Pichia spp, Saccharomyces spp, Neurospora spp); insect cell (e.g. Spodoptera spp); a mammalian cell (e.g. COS cell, CHO cell); a plant cell.

[0192] According to a further aspect of the invention there is provided a pharmaceutical composition comprising a polypeptide according to the invention including an excipient or carrier.

[0193] In a preferred embodiment of the invention said pharmaceutical composition is combined with a further therapeutic agent.

[0194] When administered the pharmaceutical composition of the present invention is administered in pharmaceutically acceptable preparations. Such preparations may routinely contain pharmaceutically acceptable concentrations of salt, buffering agents, preservatives, compatible carriers, and optionally other therapeutic agents.

[0195] The pharmaceutical compositions of the invention can be administered by any conventional route, including injection. The administration and application may, for example, be oral, intravenous, intraperitoneal, intramuscular, intracavity, intra-articuar, subcutaneous, topical (eyes), dermal (e.g a cream lipid soluble insert into skin or mucus membrane), transdermal, or intranasal.

[0196] Pharmaceutical compositions of the invention are administered in effective amounts. An “effective amount” is that amount of pharmaceuticals/compositions that alone, or together with further doses or synergistic drugs, produces the desired response. This may involve only slowing the progression of the disease temporarily, although more preferably, it involves halting the progression of the disease permanently. This can be monitored by routine methods or can be monitored according to diagnostic methods.

[0197] The doses of the pharmaceuticals compositions administered to a subject can be chosen in accordance with different parameters, in particular in accordance with the mode of administration used and the state of the subject (i.e. age, sex). When administered, the pharmaceutical compositions of the invention are applied in pharmaceutically-acceptable amounts and in pharmaceutically-acceptable compositions. When used in medicine salts should be pharmaceutically acceptable, but non-pharmaceutically acceptable salts may conveniently be used to prepare pharmaceutically-acceptable salts thereof and are not excluded from the scope of the invention. Such pharmacologically and pharmaceutically-acceptable salts include, but are not limited to, those prepared from the following acids: hydrochloric, hydrobromic, sulfuric, nitric, phosphoric, maleic, acetic, salicylic, citric, formic, malonic, succinic, and the like. Also, pharmaceutically-acceptable salts can be prepared as alkaline metal or alkaline earth salts, such as sodium, potassium or calcium salts.

[0198] The pharmaceutical compositions may be combined, if desired, with a pharmaceutically-acceptable carrier. The term “pharmaceutically-acceptable carrier” as used herein means one or more compatible solid or liquid fillers, diluents or encapsulating substances that are suitable for administration into a human. The term “carrier” denotes an organic or inorganic ingredient, natural or synthetic, with which the active ingredient is combined to facilitate the application. The components of the pharmaceutical compositions also are capable of being co-mingled with the molecules of the present invention, and with each other, in a manner such that there is no interaction that would substantially impair the desired pharmaceutical efficacy.

[0199] The pharmaceutical compositions may contain suitable buffering agents, including: acetic acid in a salt; citric acid in a salt; boric acid in a salt; and phosphoric acid in a salt.

[0200] The pharmaceutical compositions also may contain, optionally, suitable preservatives, such as: benzalkonium chloride; chlorobutanol; parabens and thimerosal.

[0201] The pharmaceutical compositions may conveniently be presented in unit dosage form and may be prepared by any of the methods well-known in the art of pharmacy. All methods include the step of bringing the active agent into association with a carrier that constitutes one or more accessory ingredients. In general, the compositions are prepared by uniformly and intimately bringing the active compound into association with a liquid carrier, a finely divided solid carrier, or both, and then, if necessary, shaping the product.

[0202] Compositions suitable for oral administration may be presented as discrete units, such as capsules, tablets, lozenges, each containing a predetermined amount of the active compound. Other compositions include suspensions in aqueous liquids or non-aqueous liquids such as syrup, elixir or an emulsion.

[0203] Compositions suitable for parenteral administration conveniently comprise a sterile aqueous or non-aqueous preparation that is preferably isotonic with the blood of the recipient. This preparation may be formulated according to known methods using suitable dispersing or wetting agents and suspending agents. The sterile injectable preparation also may be a sterile injectable solution or suspension in a non-toxic parenterally-acceptable diluent or solvent, for example, as a solution in 1, 3-butane diol. Among the acceptable solvents that may be employed are water, Ringer's solution, and isotonic sodium chloride solution. In addition, sterile, fixed oils are conventionally employed as a solvent or suspending medium. For this purpose any bland fixed oil may be employed including synthetic mono-or di-glycerides. In addition, fatty acids such as oleic acid may be used in the preparation of injectables. Carrier formulation suitable for oral, subcutaneous, intravenous, intramuscular, etc. administrations can be found in Remington's Pharmaceutical Sciences, Mack Publishing Co., Easton, Pa.

[0204] Throughout the description and claims of this specification, the words “comprise” and “contain” and variations of the words, for example “comprising” and “comprises”, means “including but not limited to”, and is not intended to (and does not) exclude other moieties, additives, components, integers or steps.

[0205] Throughout the description and claims of this specification, the singular encompasses the plural unless the context otherwise requires. In particular, where the indefinite article is used, the specification is to be understood as contemplating plurality as well as singularity, unless the context requires otherwise.

[0206] Features, integers, characteristics, compounds, chemical moieties or groups described in conjunction with a particular aspect, embodiment or example of the invention are to be understood to be applicable to any other aspect, embodiment or example described herein unless incompatible therewith.

[0207] An embodiment of the invention will now be described by example only and with reference to the following figures:

[0208] FIG. 1 is the amino acid sequence of human insulin-like growth factor 1;

[0209] FIG. 2 is the amino acid sequence of human IGF-1 receptor polypeptide extracellular domain;

[0210] FIG. 3 is the amino acid sequence of human IGF-2;

[0211] FIG. 4a is the amino acid sequence of IGF-2 receptor extracellular domain; FIG. 4b is the binding domain for IGF-2;

[0212] FIG. 5 is the amino acid sequence of human growth hormone;

[0213] FIG. 6 is the amino acid sequence of human growth hormone receptor extracellular domain;

[0214] FIG. 7 is the amino acid sequence of human leptin;

[0215] FIG. 8 is the amino acid sequence of human leptin receptor extracellular domain;

[0216] FIG. 9 is the amino acid sequence of human erythropoietin;

[0217] FIG. 10 is the amino acid sequence of human erythropoietin receptor extracellular domain;

[0218] FIG. 11 is the amino acid sequence of human prolactin;

[0219] FIG. 12 is the amino acid sequence of human prolactin receptor extracellular domain;

[0220] FIG. 13 is the amino acid sequence of human G-CSF;

[0221] FIG. 14 is the amino acid sequence of human G-CSF receptor extracellular domain;

[0222] FIG. 15 is the amino acid sequence of human somatostatin receptor 1;

[0223] FIG. 16 is the amino acid sequence of human FSH α subunit;

[0224] FIG. 17 is the amino acid sequence of human FSH β subunit;

[0225] FIG. 18 is the amino acid sequence of human FSH receptor;

[0226] FIG. 19 is the amino acid sequence of human LH β subunit;

[0227] FIG. 20 is the amino acid sequence of human LH receptor;

[0228] FIG. 21 is the amino acid sequence of human TSH β;

[0229] FIG. 22 is the amino acid sequence of human TSH receptor;

[0230] FIG. 23 illustrates growth hormone tandem GHT-G1: GH-GH tandem expressed in mammalian cells. N replaces G in central G4S. GH secretion signal shown in bold and lower case;

[0231] FIG. 24 illustrates growth hormone tandem GHT-G2: GH-GH tandem expressed in mammalian cells. N replaces G in central G4S, T replaces S. GH secretion signal shown in bold and lower case;

[0232] FIG. 25 illustrates growth hormone tandem GHT-G3: GH-GH tandem expressed in mammalian cells. N replaces G in central G4S; W replaces G before N.GH secretion signal shown in bold and lower case.

[0233] FIG. 26 illustrates growth hormone tandem GHT-G4: GH-GH tandem expressed in mammalian cells. A glycosylation signal (NAT) is placed between G4S units. GH secretion signal shown in bold and lower case.

[0234] FIG. 27 illustrates interferon β chimera 7B1-G1 N replaces G in central G4S;

[0235] FIG. 28 illustrates interferon β chimera 7B1-G2 N replaces G in central G4S, T replaces S;

[0236] FIG. 29 illustrates interferon β chimera 7B1-G3 N replaces G in central G4S, W replaces G before N;

[0237] FIG. 30 illustrates interferon β chimera 7B1-G4 which incorporates a NAT glycosylation motif;

[0238] FIG. 31 illustrates interferon β chimera 7D1-G4N replaces G in central G4S;

[0239] FIG. 32 illustrates somatostatin-14 tandem [SMS14-G1]: N replaces G in central G4S.

[0240] FIG. 33 illustrates somatostatin-14 tandem [SMS14-G2]: N replaces G in central G4S, T replaces S

[0241] FIG. 34 illustrates somatostatin-14 tandem [SMS14-G3]: N replaces G in central G4S, W replaces G before N.

[0242] FIG. 35 illustrates somatostatin-14 tandem [SMS14-G4]: A glycosylation signal (NAT) is placed between G4S units.

[0243] FIG. 36 illustrates somatostatin-14 tandem [SMS14-G6]: N replaces G in two G4S repeats;

[0244] FIG. 37 illustrates somatostatin-28 tandem [SMS28-G1]: N replaces G in central G4S.

[0245] FIG. 38 illustrates somatostatin-28 tandem [SMS28-G2]: N replaces G in central G4S, T replaces S.

[0246] FIG. 39 illustrates somatostatin-28 tandem [SMS28-G3]:N replaces G in central G4S, W replaces G before N.

[0247] FIG. 40 illustrates somatostatin-28 tandem [SMS28-G4]: A glycosylation signal (NAT) is placed between G4S units

[0248] FIG. 41 illustrates somatostatin-28 tandem [SMS28-G6]:N replaces G in two G4S repeats

[0249] FIG. 42 illustrates somatostatin-28:somatostatin-14 tandem [SMS2814-G1]:N replaces G in central G4S.

[0250] FIG. 43 illustrates somatostatin-14:somatostatin-28 tandem [SMS1428-G1]:N replaces G in central G4S;

[0251] FIG. 44 shows western blot of CHO Flp-In expressed GH tandem molecules under non reducing conditions. Lane 1; GHT-0 (wild-type), Lane 2: GHT-1, Lane 3: GHT-2, Lane 4: GHT-3, Lane 5: GHT-4

[0252] FIG. 45 Bioactivity of media samples taken from transfected CHO Fip-In cells expressing either wild-type GH tandem (GHT-0) or linker mutated GH tandem molecules (GHT-1-4). The bioassay is based on a STAT-5 reporter gene assay linked to luciferase expression, using Hek293 cells expressing full length GHR. All molecules studies exhibited GH activity in the assay;

[0253] FIG. 46a is the amino acid sequence of growth hormone fusion polypeptide 1B7-G1-V0 unprocessed; FIG. 46b is the amino acid sequence of growth hormone fusion polypeptide 1B7-G1-V0 processed; FIG. 46c is the amino acid sequence of growth hormone fusion polypeptide 1B7-G1-V1 unprocessed; FIG. 46d is the amino acid sequence of growth hormone fusion polypeptide 1B7-G1-V1 processed; FIG. 46e is the amino acid sequence of growth hormone fusion polypeptide 1B7-G1-V2 un processed; FIG. 46f is the amino acid sequence of growth hormone fusion polypeptide 1B7-G1-V2 processed;

[0254] FIG. 47a is the amino acid sequence of growth hormone fusion polypeptide 1B7-G2-V0 unprocessed; FIG. 47b is the amino acid sequence of growth hormone fusion polypeptide 1B7-G2-V0 processed; FIG. 47c is the amino acid sequence of growth hormone fusion polypeptide 1B7-G2-V1 unprocessed; FIG. 47d is the amino acid sequence of growth hormone fusion polypeptide 1B7-G2-V1 processed; FIG. 47e is the amino acid sequence of growth hormone fusion polypeptide 1B7-G2-V2 un processed; FIG. 47f is the amino acid sequence of growth hormone fusion polypeptide 1B7-G2-V2 processed;

[0255] FIG. 48a is the amino acid sequence of growth hormone fusion polypeptide 1B7-G3-V0 unprocessed; FIG. 48b is the amino acid sequence of growth hormone fusion polypeptide 1B7-G3-V0 processed; FIG. 48c is the amino acid sequence of growth hormone fusion polypeptide 1B7-G3-V1 unprocessed; FIG. 48d is the amino acid sequence of growth hormone fusion polypeptide 1B7-G3-V1 processed; FIG. 48e is the amino acid sequence of growth hormone fusion polypeptide 1B7-G3-V2 un processed; FIG. 48f is the amino acid sequence of growth hormone fusion polypeptide 1B7-G3-V2 processed;

[0256] FIG. 49a is the amino acid sequence of growth hormone fusion polypeptide 1B7-G4-V0 unprocessed; FIG. 49b is the amino acid sequence of growth hormone fusion polypeptide 1B7-G4-V0 processed; FIG. 49c is the amino acid sequence of growth hormone fusion polypeptide 1B7-G4-V1 unprocessed; FIG. 49d is the amino acid sequence of growth hormone fusion polypeptide 1B7-G4-V1 processed; FIG. 49e is the amino acid sequence of growth hormone fusion polypeptide 1B7-G4-V2 un processed; FIG. 49f is the amino acid sequence of growth hormone fusion polypeptide 1B7-G4-V2 processed;

[0257] FIG. 50a is the amino acid sequence of growth hormone fusion polypeptide 1B8-G1-V0; FIG. 50b is the amino acid sequence of growth hormone fusion polypeptide 1B8-G1-V1; FIG. 50c is the amino acid sequence of growth hormone fusion polypeptide 1B8-G1-V2; FIG. 50d is the amino acid sequence of growth hormone fusion polypeptide 1B8-G1-V3; FIG. 50e is the amino acid sequence of growth hormone fusion polypeptide 1B9-G1-V0; FIG. 50f is the amino acid sequence of growth hormone fusion polypeptide 1B9-G1-V1; FIG. 50g is the amino acid sequence of growth hormone fusion polypeptide 1B9-G1-V2; FIG. 50h is the amino acid sequence of growth hormone fusion polypeptide 1B9-G1-V3;

[0258] FIG. 51a is the amino acid sequence of growth hormone fusion polypeptide 1B8-G2-V0; FIG. 51 b is the amino acid sequence of growth hormone fusion polypeptide 1B8-G2-V1; FIG. 51c is the amino acid sequence of growth hormone fusion polypeptide 1B8-G2-V2; FIG. 51d is the amino acid sequence of growth hormone fusion polypeptide 1B8-G2-V3; FIG. 51e is the amino acid sequence of growth hormone fusion polypeptide 1B9-G2-V0; FIG. 51f is the amino acid sequence of growth hormone fusion polypeptide 1B9-G2-V1; FIG. 51g is the amino acid sequence of growth hormone fusion polypeptide 1B9-G2-V2; FIG. 51 h is the amino acid sequence of growth hormone fusion polypeptide 1B9-G2-V3;

[0259] FIG. 52a is the amino acid sequence of growth hormone fusion polypeptide 1B8-G3-V0; FIG. 52b is the amino acid sequence of growth hormone fusion polypeptide 1B8-G3-V1; FIG. 52c is the amino acid sequence of growth hormone fusion polypeptide 1B8-G3-V2; FIG. 52d is the amino acid sequence of growth hormone fusion polypeptide 1B8-G3-V3; FIG. 52e is the amino acid sequence of growth hormone fusion polypeptide 1B9-G3-V0; FIG. 52f is the amino acid sequence of growth hormone fusion polypeptide 1B9-G3-V1; FIG. 52g is the amino acid sequence of growth hormone fusion polypeptide 1B9-G3-V2; FIG. 52h is the amino acid sequence of growth hormone fusion polypeptide 1B9-G3-V3;

[0260] FIG. 53a is the amino acid sequence of growth hormone fusion polypeptide 1B8-G4-V0; FIG. 53b is the amino acid sequence of growth hormone fusion polypeptide 1B8-G4-V1; FIG. 53c is the amino acid sequence of growth hormone fusion polypeptide 1B8-G4-V2; FIG. 53d is the amino acid sequence of growth hormone fusion polypeptide 1B8-G4-V3; FIG. 53e is the amino acid sequence of growth hormone fusion polypeptide 1B9-G4-V0; FIG. 53f is the amino acid sequence of growth hormone fusion polypeptide 1B9-G4-V1; FIG. 53g is the amino acid sequence of growth hormone fusion polypeptide 1B9-G4-V2; FIG. 53h is the amino acid sequence of growth hormone fusion polypeptide 1B9-G4-V3;

[0261] FIG. 54a EPO-G1. 1 is the amino acid sequence for EPO-LI-EPOrEC: (EPO linked via a (G4S) 4 based glycolinker to EPOrEC) expressed in mammalian cells. (length=406aa without signal sequence). Signal sequence shown in bold; FIG. 54b EPO-G1. 2 is the amino acid sequence of EPO-L2-EPOrEC (EPO linked via a (G4S)3 based glycolinker to EPOrEC) expressed in mammalian cells. Sequence represents the full sequence expressed in a mammalian cell line along with the signal sequence. (length=401aa without signal sequence). Signal sequence shown in bold;

[0262] FIG. 55a EPO-G2. 1 is the amino acid sequence for EPO-L1-EPOrEC: (EPO linked via a (G4S) 4 based glycolinker to EPOrEC) expressed in mammalian cells. (length=406aa without signal sequence). Signal sequence shown in bold; FIG. 55b EPO-G2. 2 is the amino acid sequence of EPO-L2-EPOrEC (EPO linked via a (G4S)3 based glycolinker to EPOrEC) expressed in mammalian cells. Sequence represents the full sequence expressed in a mammalian cell line along with the signal sequence. (length=401aa without signal sequence). Signal sequence shown in bold;

[0263] FIG. 56a EPO-G3. 1 is the amino acid sequence for EPO-LI-EPOrEC: (EPO linked via a (G4S) 4 based glycolinker to EPOrEC) expressed in mammalian cells. (length=406aa without signal sequence). Signal sequence shown in bold; FIG. 56b EPO-G3. 2 is the amino acid sequence of EPO-L2-EPOrEC (EPO linked via a (G4S)3 based glycolinker to EPOrEC) expressed in mammalian cells. Sequence represents the full sequence expressed in a mammalian cell line along with the signal sequence. (length=401aa without signal sequence). Signal sequence shown in bold;

[0264] FIG. 57a EPO-G4. 1 is the amino acid sequence for EPO-LI-EPOrEC: (EPO linked via a (G4S) 4 based glycolinker to EPOrEC) expressed in mammalian cells. (length=406aa without signal sequence). Signal sequence shown in bold; FIG. 57b EPO-G4. 2 is the amino acid sequence of EPO-L2-EPOrEC (EPO linked via a (G4S)3 based glycolinker to EPOrEC) expressed in mammalian cells. Sequence represents the full sequence expressed in a mammalian cell line along with the signal sequence. (length=401aa without signal sequence). Signal sequence shown in bold;

[0265] FIG. 58a GCSF-G1. 1. amino acid sequence encoding GCSF-L6-GCSFrEC (1-3): contains GCSF linked via G4Sx6-based glycolinker to GCSF extracellular receptor domains 1-3 (Ig, BN and BC). amino acid sequence length=511aa (not including signal sequence);

[0266] FIG. 58b GCSF-G1. 2. amino acid sequence encoding GCSF-L8-GCSFrEC (1-3) expressed in a mammalian cell line: contains GCSF linked via G4Sx8-based glycolinker to GCSF extracellular receptor domains 1-3 (Ig, BN and BC). Signal sequence in bold and lower case; Amino acid sequence length=521 aa (not including signal sequence)

[0267] FIG. 58c GCSF-G1. 3. amino acid sequence encoding GCSF-L6-GCSFrEC (1-2): contains GCSF linked via G4Sx6-based glycolinker to GCSF extracellular receptor domains 1-2 (Ig and BN). Amino acid sequence length=404aa (not including signal sequence)

[0268] FIG. 58d GCSF-G1. 4. amino acid acid encoding GCSF-L6-GCSFrEC (2-3): contains GCSF linked via G4Sx6-based glycolinker to GCSF extracellular receptor domains 2-3 (BN and BC). *refers to stop codon. Signal sequence in bold and lower case; FIG. 58e GCSF-G1. 8b amino acid sequence length=416aa (not including signal sequence)

[0269] FIG. 58e GCSF-G1. 5. amino acid encoding GCSFrEC (1-3)-L6-GCSF: contains GCSFrEC (domains 1-3) linked via G4Sx6-based glycolinker to GCSF. Amino acid sequence length=511 as (not including signal sequence)

[0270] FIG. 58f GCSF-G1. 6. amino acid encoding GCSFrEC (2-3)-L6-GCSF expressed in a mammalian cell line: contains GCSFrEC (domains 2-3) linked via G4Sx6-based glycolinker to GCSF. Signal sequence in bold and lower case; amino acid sequence length=416aa (not including signal sequence)

[0271] FIG. 59a GCSF-G2. 1. amino acid sequence encoding GCSF-L6-GCSFrEC (1-3): contains GCSF linked via G4Sx6-based glycolinker to GCSF extracellular receptor domains 1-3 (Ig, BN and BC). amino acid sequence length=511aa (not including signal sequence);

[0272] FIG. 59b GCSF-G2. 2. amino acid sequence encoding GCSF-L8-GCSFrEC (1-3) expressed in a mammalian cell line: contains GCSF linked via G4Sx8-based glycolinker to GCSF extracellular receptor domains 1-3 (Ig, BN and BC). Signal sequence in bold and lower case; Amino acid sequence length=521aa (not including signal sequence)

[0273] FIG. 59c GCSF-G2. 3. amino acid sequence encoding GCSF-L6-GCSFrEC (1-2): contains GCSF linked via G4Sx6-based glycolinker to GCSF extracellular receptor domains 1-2 (Ig and BN). Amino acid sequence length=404aa (not including signal sequence)

[0274] FIG. 59d GCSF-G2. 4. amino acid acid encoding GCSF-L6-GCSFrEC (2-3): contains GCSF linked via G4Sx6-based glycolinker to GCSF extracellular receptor domains 2-3 (BN and BC). *refers to stop codon. Signal sequence in bold and lower case; Figure GCSF-G2. 8b amino acid sequence length=416aa (not including signal sequence)

[0275] FIG. 59e GCSF-G2. 5. amino acid encoding GCSFrEC (1-3)-L6-GCSF: contains GCSFrEC (domains 1-3) linked via G4Sx6-based glycolinker to GCSF. Amino acid sequence length=511aa (not including signal sequence)

[0276] FIG. 59f GCSF-G2. 6. amino acid encoding GCSFrEC (2-3)-L6-GCSF expressed in a mammalian cell line: contains GCSFrEC (domains 2-3) linked via G4Sx6-based glycolinker to GCSF. Signal sequence in bold and lower case; amino acid sequence length=416aa (not including signal sequence)

[0277] FIG. 60a GCSF-G3. 1. amino acid sequence encoding GCSF-L6-GCSFrEC (1-3): contains GCSF linked via G4Sx6-based glycolinker to GCSF extracellular receptor domains 1-3 (Ig, BN and BC). amino acid sequence length=511aa (not including signal sequence);

[0278] FIG. 60b GCSF-G3. 2. amino acid sequence encoding GCSF-L8-GCSFrEC (1-3) expressed in a mammalian cell line: contains GCSF linked via G4Sx8-based glycolinker to GCSF extracellular receptor domains 1-3 (Ig, BN and BC). Signal sequence in bold and lower case; Amino acid sequence length=521aa (not including signal sequence)

[0279] FIG. 60c GCSF-G3. 3. amino acid sequence encoding GCSF-L6-GCSFrEC (1-2): contains GCSF linked via G4Sx6-based glycolinker to GCSF extracellular receptor domains 1-2 (Ig and BN). Amino acid sequence length=404aa (not including signal sequence)

[0280] FIG. 60d GCSF-G3. 4. amino acid acid encoding GCSF-L6-GCSFrEC (2-3): contains GCSF linked via G4Sx6-based glycolinker to GCSF extracellular receptor domains 2-3 (BN and BC). *refers to stop codon. Signal sequence in bold and lower case; Figure GCSF-G3. 8b amino acid sequence length=416aa (not including signal sequence)

[0281] FIG. 60e GCSF-G3. 5. amino acid encoding GCSFrEC (1-3)-L6-GCSF: contains GCSFrEC (domains 1-3) linked via G4Sx6-based glycolinker to GCSF. Amino acid sequence length=511 aa (not including signal sequence)

[0282] FIG. 60f GCSF-G3. 6. amino acid encoding GCSFrEC (2-3)-L6-GCSF expressed in a mammalian cell line: contains GCSFrEC (domains 2-3) linked via G4Sx6-based glycolinker to GCSF. Signal sequence in bold and lower case; amino acid sequence length=416aa (not including signal sequence)

[0283] FIG. 61a GCSF-G4. 1. amino acid sequence encoding GCSF-L6-GCSFrEC (1-3): contains GCSF linked via G4Sx6-based glycolinker to GCSF extracellular receptor domains 1-3 (Ig, BN and BC). amino acid sequence length=511aa (not including signal sequence);

[0284] FIG. 61b GCSF-G4. 2. amino acid sequence encoding GCSF-L8-GCSFrEC (1-3) expressed in a mammalian cell line: contains GCSF linked via G4Sx8-based glycolinker to GCSF extracellular receptor domains 1-3 (Ig, BN and BC). Signal sequence in bold and lower case; Amino acid sequence length=521aa (not including signal sequence)

[0285] FIG. 61c GCSF-G4. 3. amino acid sequence encoding GCSF-L6-GCSFrEC (1-2): contains GCSF linked via G4Sx6-based glycolinker to GCSF extracellular receptor domains 1-2 (Ig and BN). Amino acid sequence length=404aa (not including signal sequence)

[0286] FIG. 61d GCSF-G4. 4. amino acid acid encoding GCSF-L6-GCSFrEC (2-3): contains GCSF linked via G4Sx6-based glycolinker to GCSF extracellular receptor domains 2-3 (BN and BC). *refers to stop codon. Signal sequence in bold and lower case; Figure GCSF-G4. 8b amino acid sequence length=416aa (not including signal sequence)

[0287] FIG. 61e GCSF-G4. 5. amino acid encoding GCSFrEC (1-3)-L6-GCSF: contains GCSFrEC (domains 1-3) linked via G4Sx6-based glycolinker to GCSF. Amino acid sequence length=511aa (not including signal sequence)

[0288] FIG. 61f GCSF-G4. 6. amino acid encoding GCSFrEC (2-3)-L6-GCSF expressed in a mammalian cell line: contains GCSFrEC (domains 2-3) linked via G4Sx6-based glycolinker to GCSF. Signal sequence in bold and lower case; amino acid sequence length=416aa (not including signal sequence)

[0289] FIG. 62a IFN-G1. 1 is the amino acid sequence of LR 7A1;

[0290] FIG. 62b IFN-G1. 2 is the amino acid sequence of LR 7B1;

[0291] FIG. 62c IFN-G1. 3 is the amino acid sequence of LR 7C1;

[0292] FIG. 62d IFN-G1. 4 is the amino acid sequence of LR 7D1;

[0293] FIG. 62e IFN-G1. 5 is the amino acid sequence of LR a7B1;

[0294] FIG. 63a IFN-G2. 1 is the amino acid sequence of LR 7A1;

[0295] FIG. 63b IFN-G2. 2 is the amino acid sequence of LR 7B1;

[0296] FIG. 63c IFN-G2. 3 is the amino acid sequence of LR 7C1;

[0297] FIG. 63d IFN-G2. 4 is the amino acid sequence of LR 7D1;

[0298] FIG. 63e IFN-G2. 5 is the amino acid sequence of LR a7B1;

[0299] FIG. 64a IFN-G3. 1 is the amino acid sequence of LR 7A1;

[0300] FIG. 64b IFN-G3. 2 is the amino acid sequence of LR 7B1;

[0301] FIG. 64c IFN-G3. 3 is the amino acid sequence of LR 7C1;

[0302] FIG. 64d IFN-G3. 4 is the amino acid sequence of LR 7D1;

[0303] FIG. 64e IFN-G3. 5 is the amino acid sequence of LR a7B1;

[0304] FIG. 65a IFN-G4. 1 is the amino acid sequence of LR 7A1;

[0305] FIG. 65b IFN-G4. 2 is the amino acid sequence of LR 7B1;

[0306] FIG. 65c IFN-G4. 3 is the amino acid sequence of LR 7C1;

[0307] FIG. 65d IFN-G4. 4 is the amino acid sequence of LR 7D1;

[0308] FIG. 65e IFN-G4. 5 is the amino acid sequence of LR a7B1;

[0309] FIG. 66a IGF1-G1. 1 is the amino acid sequence of LR5A1;

[0310] FIG. 66b IGF1-G1. 2 is the amino acid sequence of LR5B1;

[0311] FIG. 66c IGF1-G1. 3 is the amino acid sequence of LR5C1;

[0312] FIG. 66d IGF1-G1. 4 is the amino acid sequence of LR5D1;

[0313] FIG. 66e IGF1-G1. 5 is the amino acid sequence of LR5E1;

[0314] FIG. 66f IGF1-G1. 6 is the amino acid sequence of LR5F1;

[0315] FIG. 67a IGF1-G2. 1 is the amino acid sequence of LR5A1;

[0316] FIG. 67b IGF1-G2. 2 is the amino acid sequence of LR5B1;

[0317] FIG. 67c IGF1-G2. 3 is the amino acid sequence of LR5C1;

[0318] FIG. 67d IGF1-G2. 4 is the amino acid sequence of LR5D1;

[0319] FIG. 67e IGF1-G2. 5 is the amino acid sequence of LR5E1;

[0320] FIG. 67f IGF1-G2. 6 is the amino acid sequence of LR5F1;

[0321] FIG. 68a IGF1-G3. 1 is the amino acid sequence of LR5A1;

[0322] FIG. 68b IGF1-G3. 2 is the amino acid sequence of LR5B1;

[0323] FIG. 68c IGF1-G3. 3 is the amino acid sequence of LR5C1;

[0324] FIG. 68d IGF1-G3. 4 is the amino acid sequence of LR5D1;

[0325] FIG. 68e IGF1-G3. 5 is the amino acid sequence of LR5E1;

[0326] FIG. 68f IGF1-G3. 6 is the amino acid sequence of LR5F1;

[0327] FIG. 69a IGF1-G4. 1 is the amino acid sequence of LR5A1;

[0328] FIG. 69b IGF1-G4. 2 is the amino acid sequence of LR5B1;

[0329] FIG. 69c IGF1-G4. 3 is the amino acid sequence of LR5C1;

[0330] FIG. 69d IGF1-G4. 4 is the amino acid sequence of LR5D1;

[0331] FIG. 69e IGF1-G4. 5 is the amino acid sequence of LR5E1;

[0332] FIG. 69f IGF1-G4. 6 is the amino acid sequence of LR5F1;

[0333] FIG. 70a IL2-G1. 1 is the amino acid sequence of LR 6A1;

[0334] FIG. 70b IL2-G1. 2 is the amino acid sequence of LR 6B1;

[0335] FIG. 70c IL2-G1. 3 is the amino acid sequence of LR 6C1;

[0336] FIG. 70d IL2-G1. 4 is the amino acid sequence of LR 6D1;

[0337] FIG. 70e IL2-G1. 5 is the amino acid sequence of LR 6E1;

[0338] FIG. 70f IL2-G1. 6 is the amino acid sequence of LR 6E2;

[0339] FIG. 70g IL2-G1. 7 is the amino acid sequence of LR 6F1;

[0340] FIG. 70h IL2-G1. 8 is the amino acid sequence of LR fusion IL7ss-IL7-(G₄S)₄-IL7Ralpha;

[0341] FIG. 70i IL2-G1. 9 is the amino acid sequence of LR fusion IL7ss-IL7-(G₄S)₅-IL2Rgamma;

[0342] FIG. 70j IL2-G1. 10 is the amino acid sequence of LR fusion IL7Rass-IL7Ralpha-(G4S)₄-I L7;

[0343] FIG. 70k IL2-G1. 11 is the amino acid sequence of LR fusion IL2gss-IL2gamma-(G₄S)₅-IL7;

[0344] FIG. 701 IL2-G1. 12 is the amino acid sequence of LR fusion IL7-(G₄S)₄-IL7Ralpha;

[0345] FIG. 70m IL2-G1. 13 is the amino sequence of LR fusion IL7-(G₄S)₅-IL2Rgamma;

[0346] FIG. 70n IL2-G1. 14 is the amino sequence of LR fusion IL7RaIpha-(G₄S)₄-IL7;

[0347] FIG. 70o IL2-G1. 15 is the amino acid sequence of LR fusion IL2gamma-(G₄S)₅-IL7;

[0348] FIG. 70p IL2-G1. 16 is the amino acid sequence of LR a7B1

[0349] FIG. 71a IL2-G2. 1 is the amino acid sequence of LR 6A1;

[0350] FIG. 71b IL2-G2. 2 is the amino acid sequence of LR 6B1;

[0351] FIG. 71c IL2-G2. 3 is the amino acid sequence of LR 6C1;

[0352] FIG. 71d IL2-G2. 4 is the amino acid sequence of LR 6D1;

[0353] FIG. 71e IL2-G2. 5 is the amino acid sequence of LR 6E1;

[0354] FIG. 71f IL2-G2. 6 is the amino acid sequence of LR 6E2;

[0355] FIG. 71g IL2-G2. 7 is the amino acid sequence of LR 6F1;

[0356] FIG. 71h IL2-G2. 8 is the amino acid sequence of LR fusion IL7ss-IL7-(G₄S)₄-IL7Ralpha;

[0357] FIG. 71i IL2-G2. 9 is the amino acid sequence of LR fusion IL7ss-IL7-(G₄S)₅-IL2Rgamma;

[0358] FIG. 71j IL2-G2. 10 is the amino acid sequence of LR fusion IL7Rass-IL7RaIpha-(G₄S)₄-I L7;

[0359] FIG. 71k IL2-G2. 11 is the amino acid sequence of LR fusion IL2gss-IL2gamma-(G₄S)₅-IL7;

[0360] FIG. 71l IL2-G2. 12 is the amino acid sequence of LR fusion IL7-(G₄S)₄-IL7RaIpha;

[0361] FIG. 71m IL2-G2. 13 is the amino sequence of LR fusion IL7-(G₄S)₅-IL2Rgamma;

[0362] FIG. 71 n 1L2-G2. 14 is the amino sequence of LR fusion IL7RaIpha-(G₄S)₄-IL7;

[0363] FIG. 710 IL2-G2. 15 is the amino acid sequence of LR fusion IL2gamma-(G₄S)₅-IL7;

[0364] FIG. 71p 1L2-G2. 16 is the amino acid sequence of LR a7B1

[0365] FIG. 72a 1L2-G3. 1 is the amino acid sequence of LR 6A1;

[0366] FIG. 72b IL2-G3. 2 is the amino acid sequence of LR 6B1;

[0367] FIG. 72c IL2-G3. 3 is the amino acid sequence of LR 6C1;

[0368] FIG. 72d IL2-G3. 4 is the amino acid sequence of LR 6D1;

[0369] FIG. 72e IL2-G3. 5 is the amino acid sequence of LR 6E1;

[0370] FIG. 72f 1L2-G3. 6 is the amino acid sequence of LR 6E2;

[0371] FIG. 72g IL2-G3. 7 is the amino acid sequence of LR 6F1;

[0372] FIG. 72h 11_2-G3. 8 is the amino acid sequence of LR fusion IL7ss-IL7-(G₄S)₄-IL7Ralpha;

[0373] FIG. 72i IL2-G3. 9 is the amino acid sequence of LR fusion IL7ss-IL7-(G₄S)₅-IL2Rgamma;

[0374] FIG. 72j IL2-G3. 10 is the amino acid sequence of LR fusion IL7Rass-IL7Ralpha-(G₄S)₄-IL7;

[0375] FIG. 72k IL2-G3. 11 is the amino acid sequence of LR fusion IL2gss-IL2gamma-(G₄S)₅-IL7;

[0376] FIG. 72l IL2-G3. 12 is the amino acid sequence of LR fusion IL7-(G₄S)₄-IL7Ralpha;

[0377] FIG. 72m IL2-G3. 13 is the amino sequence of LR fusion IL7-(G₄S)₅-IL2Rgamma;

[0378] FIG. 72n IL2-G3. 14 is the amino sequence of LR fusion IL7Ralpha-(G₄S)₄-IL7;

[0379] FIG. 72o IL2-G3. 15 is the amino acid sequence of LR fusion IL2gamma-(G₄S)₅-IL7;

[0380] FIG. 72p IL2-G3. 16 is the amino acid sequence of LR a7B1

[0381] FIG. 73a IL2-G4. 1 is the amino acid sequence of LR 6A1;

[0382] FIG. 73b IL2-G4. 2 is the amino acid sequence of LR 6B1;

[0383] FIG. 73c IL2-G4. 3 is the amino acid sequence of LR 6C1;

[0384] FIG. 73d IL2-G4. 4 is the amino acid sequence of LR 601;

[0385] FIG. 73e IL2-G4. 5 is the amino acid sequence of LR 6E1;

[0386] FIG. 73f IL2-G4. 6 is the amino acid sequence of LR 6E2;

[0387] FIG. 73g IL2-G4. 7 is the amino acid sequence of LR 6F1;

[0388] FIG. 73h IL2-G4. 8 is the amino acid sequence of LR fusion IL7ss-IL7-(G₄S)₄-IL7Ralpha;

[0389] FIG. 73i IL2-G4. 9 is the amino acid sequence of LR fusion IL7ss-IL7-(G₄S)₅-IL2Rgamma;

[0390] FIG. 73j IL2-G4. 10 is the amino acid sequence of LR fusion IL7Rass-IL7RaIpha-(G₄S)₄-IL7;

[0391] FIG. 73k IL2-G4. 11 is the amino acid sequence of LR fusion IL2gss-IL2gamma-(G₄S)₅-IL7;

[0392] FIG. 731 IL2-G4. 12 is the amino acid sequence of LR fusion IL7-(G₄S)₄-IL7Ralpha;

[0393] FIG. 73m 1L2-G4. 13 is the amino sequence of LR fusion IL7-(G₄S)₅-IL2Rgamma;

[0394] FIG. 73n IL2-G4. 14 is the amino sequence of LR fusion IL7Ralpha-(G₄S)₄-IL7;

[0395] FIG. 73o IL2-G4. 15 is the amino acid sequence of LR fusion IL2gamma-(G₄S)₅-IL7;

[0396] FIG. 73p IL2-G4. 16 is the amino acid sequence of LR a7B1

[0397] FIG. 74a LEPTIN-G1. 1 is the amino acid sequence of LR 2A1;

[0398] FIG. 74b LEPTIN-G1. 2 is the amino acid sequence of LR 2A1 adapted for bacterial expression;

[0399] FIG. 74c LEPT1N-G1. 3 is the amino acid sequence of LR 2B1;

[0400] FIG. 74d LEPTIN-G1. 4 is the amino acid sequence of LR 2D1;

[0401] FIG. 74e LEPTIN-G1. 5 is the amino acid sequence of LR 2E1;

[0402] FIG. 74f LEPTIN-G1. 6 is the amino acid sequence of LR 2F1;

[0403] FIG. 74g LEPTIN-G1. 7 is the amino acid sequence of LR 2G1;

[0404] FIG. 74h LEPT1N-G1. 8 is the amino acid sequence of LR 2H1;

[0405] FIG. 74i LEPTIN-G1. 9 is the amino acid sequence of LR 2I1;

[0406] FIG. 74j LEPTIN-G1. 10 is the amino acid sequence of LR 2J1;

[0407] FIG. 74k LEPTIN-G1. 11 is the amino acid sequence of LR 2K1;

[0408] FIG. 741 LEPTIN-G1. 12 is the amino acid sequence of LR 2L1;

[0409] FIG. 74m LEPT1N-G1. 13 is the amino acid sequence of LR 2M1;

[0410] FIG. 75a LEPTIN-G2. 1 is the amino acid sequence of LR 2A1;

[0411] FIG. 75b LEPTIN-G2. 2 is the amino acid sequence of LR 2A1 adapted for bacterial expression;

[0412] FIG. 75c LEPTIN-G2. 3 is the amino acid sequence of LR 2B1;

[0413] FIG. 75d LEPTIN-G2. 4 is the amino acid sequence of LR 2D1;

[0414] FIG. 75e LEPTIN-G2. 5 is the amino acid sequence of LR 2E1;

[0415] FIG. 75 LEPTIN-G2. 6 is the amino acid sequence of LR 2F1;

[0416] FIG. 75g LEPTIN-G2. 7 is the amino acid sequence of LR 2G1;

[0417] FIG. 75h LEPTIN-G2. 8 is the amino acid sequence of LR 2H1;

[0418] FIG. 75i LEPTIN-G2. 9 is the amino acid sequence of LR 2I1;

[0419] FIG. 75j LEPTIN-G2. 10 is the amino acid sequence of LR 2J1;

[0420] FIG. 75k LEPTIN-G2. 11 is the amino acid sequence of LR 2K1;

[0421] FIG. 75I LEPTIN-G2. 12 is the amino acid sequence of LR 2L1;

[0422] FIG. 75m LEPTIN-G2. 13 is the amino acid sequence of LR 2M1;

[0423] FIG. 76a LEPTIN-G3. 1 is the amino acid sequence of LR 2A1;

[0424] FIG. 76b LEPTIN-G3. 2 is the amino acid sequence of LR 2A1 adapted for bacterial expression;

[0425] FIG. 76c LEPTIN-G3. 3 is the amino acid sequence of LR 2B1;

[0426] FIG. 76d LEPTIN-G3. 4 is the amino acid sequence of LR 2D1;

[0427] FIG. 76e LEPTIN-G3. 5 is the amino acid sequence of LR 2E1;

[0428] FIG. 76f LEPTIN-G3. 6 is the amino acid sequence of LR 2F1;

[0429] FIG. 76g LEPTIN-G3. 7 is the amino acid sequence of LR 2G1;

[0430] FIG. 76h LEPTIN-G3. 8 is the amino acid sequence of LR 2H1;

[0431] FIG. 76i LEPTIN-G3. 9 is the amino acid sequence of LR 2I1;

[0432] FIG. 76j LEPTIN-G3. 10 is the amino acid sequence of LR 2J1;

[0433] FIG. 76k LEPTIN-G3. 11 is the amino acid sequence of LR 2K1;

[0434] FIG. 76l LEPTIN-G3. 12 is the amino acid sequence of LR 2L1;

[0435] FIG. 76m LEPTIN-G3. 13 is the amino acid sequence of LR 2M1;

[0436] FIG. 77a LEPTIN-G4. 1 is the amino acid sequence of LR 2A1;

[0437] FIG. 77b LEPTIN-G4. 2 is the amino acid sequence of LR 2A1 adapted for bacterial expression;

[0438] FIG. 77c LEPTIN-G4. 3 is the amino acid sequence of LR 2B1;

[0439] FIG. 77d LEPTIN-G4. 4 is the amino acid sequence of LR 2D1;

[0440] FIG. 77e LEPTIN-G4. 5 is the amino acid sequence of LR 2E1;

[0441] FIG. 77f LEPTIN-G4. 6 is the amino acid sequence of LR 2F1;

[0442] FIG. 77g LEPTIN-G4. 7 is the amino acid sequence of LR 2G1;

[0443] FIG. 77h LEPTIN-G4. 8 is the amino acid sequence of LR 2H1;

[0444] FIG. 77i LEPTIN-G4. 9 is the amino acid sequence of LR 2I1;

[0445] FIG. 77j LEPTIN-G4. 10 is the amino acid sequence of LR 2J1;

[0446] FIG. 77k LEPTIN-G4. 11 is the amino acid sequence of LR 2K1;

[0447] FIG. 77l LEPTIN-G4. 12 is the amino acid sequence of LR 2L1;

[0448] FIG. 77m LEPTIN-G4. 13 is the amino acid sequence of LR 2M1;

[0449] FIG. 78a PRL-G1. 1 is the amino acid sequence of 8B7v2: PRL linked via a G4Sx6-based glycolinker to PRLRext amino acid Protein sequence: 439 amino acids (not including signal sequence);

[0450] FIG. 78b PRL-G1. 2 is the amino acid sequence of 8B8v2: PRL (G129Rmutation) linked via G4Sx6 based glycolinker to PRLRext, signal sequence shown in bold. G129R mutation highlighted; (439 amino acids not including signal sequence).

[0451] FIG. 78c PRL-G1. 3 is the amino acid sequence of 8B9v2: Consists of PRL (Deleted N-terminal residues 1-9/C11S/G129R mutations) linked via a G4S x6-based glycolinker to PRLRext. Signal sequence is shown in bold. C11S and G129R mutations highlighted; 430 amino acids (not including signal sequence).

[0452] FIG. 79a PRL-G2. 1 is the amino acid sequence of 8B7v2: PRL linked via a G4Sx6-based glycolinker to PRLRext amino acid Protein sequence: 439 amino acids (not including signal sequence);

[0453] FIG. 79b PRL-G2. 2 is the amino acid sequence of 8B8v2: PRL (G129Rmutation) linked via G4Sx6 based glycolinker to PRLRext, signal sequence shown in bold. G129R mutation highlighted; (439 amino acids not including signal sequence).

[0454] FIG. 79c PRL-G2. 3 is the amino acid sequence of 8B9v2: Consists of PRL (Deleted N-terminal residues 1-9/C11S/G129R mutations) linked via a G4S x6-based glycolinker to PRLRext. Signal sequence is shown in bold. C11S and G129R mutations highlighted; 430 amino acids (not including signal sequence).

[0455] FIG. 80a PRL-G3. 1 is the amino acid sequence of 8B7v2: PRL linked via a G4Sx6-based glycolinker to PRLRext amino acid Protein sequence: 439 amino acids (not including signal sequence);

[0456] FIG. 80b PRL-G3. 2 is the amino acid sequence of 8B8v2: PRL (G129Rmutation) linked via G4Sx6 based glycolinker to PRLRext, signal sequence shown in bold. G129R mutation highlighted; (439 amino acids not including signal sequence).

[0457] FIG. 80c PRL-G3. 3 is the amino acid sequence of 8B9v2: Consists of PRL (Deleted N-terminal residues 1-9/C11S/G129R mutations) linked via a G4S x6-based glycolinker to PRLRext. Signal sequence is shown in bold. C11S and G129R mutations highlighted; 430 amino acids (not including signal sequence).

[0458] FIG. 81a PRL-G4. 1 is the amino acid sequence of 8B7v2: PRL linked via a G4Sx6-based glycolinker to PRLRext amino acid Protein sequence: 439 amino acids (not including signal sequence);

[0459] FIG. 81b PRL-G4. 2 is the amino acid sequence of 8B8v2: PRL (G129Rmutation) linked via G4Sx6 based glycolinker to PRLRext, signal sequence shown in bold. G129R mutation highlighted; (439 amino acids not including signal sequence).

[0460] FIG. 81c PRL-G4. 3 is the amino acid sequence of 8B9v2: Consists of PRL (Deleted N-terminal residues 1-9/C11S/G129R mutations) linked via a G4S x6-based glycolinker to PRLRext. Signal sequence is shown in bold. C11S and G129R mutations highlighted; 430 amino acids (not including signal sequence).

[0461] Table 1 illustrates the domains in full length somatostatin 1 receptor and the full length amino acid sequence;

[0462] Table 2 illustrates the domains in full length FSH receptor and the full length amino acid sequence;

[0463] Table 3 illustrates the domains in full length LH receptor and the full length amino acid sequence;

[0464] Table 4 illustrates the domains in full length TSH receptor and the full length amino acid sequence; and

[0465] Table 5 illustrates growth hormone tandem construct nomenclature referred to in the examples and figures.

[0466] Materials and Methods

[0467] Immunological Testing

[0468] Immunoassays that measure the binding of fusion protein or receptor to polyclonal and monoclonal antibodies are known in the art. Commercially available antibodies are available to detect the fusion protein or receptor in samples and also for use in competitive inhibition studies.

[0469] Recombinant Production of Fusion Proteins

[0470] The components of the fusion proteins were generated by PCR using primers designed to anneal to the ligand or receptor and to introduce suitable restriction sites for cloning into the target vector. The template for the PCR comprised the target gene and was obtained from IMAGE clones, cDNA libraries or from custom synthesised genes. Once the ligand and receptor genes with the appropriate flanking restriction sites had been synthesised, these were then ligated either side of the linker region in the target vector. The construct was then modified to contain the correct linker without flanking restriction sites by the insertion of a custom synthesised length of DNA between two unique restriction sites either side of the linker region, by mutation of the linker region by ssDNA modification techniques, by insertion of a primer duplex/multiplex between suitable restriction sites or by PCR modification.

[0471] Alternatively, the linker with flanking sequence, designed to anneal to the ligand or receptor domains of choice, was initially synthesised by creating an oligonucleotide duplex and this processed to generate double-stranded DNA. PCRs were then performed using the linker sequence as a “megaprimer”, primers designed against the opposite ends of the ligand and receptor to which the “megaprimer” anneals to and with the ligand and receptor as the templates. The terminal primers were designed with suitable restriction sites for ligation into the expression vector of choice.

[0472] Expression and Purification of Glycosylated Fusion Proteins

[0473] Expression was carried out in a suitable system (e.g. mammalian CHO cells,) and this was dependant on the vector into which the LR-fusion gene was generated. Expression was then analysed using a variety of methods which could include one or more of SDS-PAGE, Native PAGE, western blotting, ELISA.

[0474] Once a suitable level of expression was achieved the LR-fusions were expressed at a larger scale to produce enough protein for purification and subsequent analysis.

[0475] Purification was carried out using a suitable combination of one or more chromatographic procedures such as ion exchange chromatography, hydrophobic interaction chromatography, ammonium sulphate precipitation, gel filtration, size exclusion and/or affinity chromatography (using nickel/cobalt-resin, antibody-immobilised resin and/or ligand/receptor-immobilised resin).

[0476] Purified protein was analysed using a variety of methods which could include one or more of Bradford's assay, SDS-PAGE, Native PAGE, western blotting, ELISA.

[0477] Characterisation of Glycosylated Fusion Proteins

[0478] Denaturing PAGE, native PAGE gels and western blotting were used to analyse the fusion polypeptides and western blotting performed with antibodies non-conformationally sensitive to the fusion protein. Native solution state molecular weight information can be obtained from techniques such as size exclusion chromatography using a Superose G200 analytical column and analytical ultracentrifugation.

[0479] Construction of Growth Hormone Tandem Molecules

[0480] The method utilises glycosylated linkers (consisting of variable repeats of Gly4Ser) to increase the molecular weight of the protein. N-linked glycosylation recognition sequences are inserted into these linker regions of tandem GH molecules (Sequence is composed of either Asn-X-Ser or Asn-X-Thr, wherein X can be any amino acid except Pro).

[0481] All molecules were gene synthesized and ligated into the mammalian expression vector pSecTag-link. Protein is expressed as a secreted product under the control of the growth hormone secretion signal.

[0482] Mammalian Stable Expression

[0483] A mammalian expression system has been established using a modification of the invitrogen vector pSecTag-V5/FRT-Hist

[0484] Invitrogen's Flp-In System

[0485] This system allows for the rapid generation of stable clones into specific sites within the host genome for high expression. This can be used with either secreted or cytoplasmic expressed proteins. Flp-In host cell lines (flp-In CHO) have a single Flp recombinase target (FRT) site located at a transcriptionally active genomic locus

[0486] Stable cell lines are generated by co-transfection of vector (Containing FRT target site) and pOG44 (a [plasmid that transiently expresses flp recombinase) into Flp-In cell line. Selection is with Hygromycin B. There is no need for clonal selection since integration of DNA is directed. Culturing Flp-In Cell lines: followed manufactures instruction using basic cell culture techniques.

[0487] Stable Transfection of CHO FIp-In Cells using Fugene-6

[0488] The day before transfection CHO FIp-In cells were seeded at 6×10E5 per 100 mm petri dish in a total volume of 10 ml of Hams F12 media containing 10% (v/v) Fetal Calf Serum, 1% Penicillin/streptomycin and 4 mM L-glutamine. The next day added 570 μl of serum free media (containing no antibiotics) to a 1.5 ml polypropylene tube. 30 μl of fugene-6 was then added and mixed by gentle rolling. A separate mix of plasmids was set up for each transfection which combined 2 μg plasmid of interest with 18 μg pOG44 (plasmid contains recombinase enzyme necessary for correct integration of plasmid into host genome). Control plate received no plasmid. This was mixed with fugene-6 by gentle rolling, left @ RmT for 15 minutes, then applied drop-wise to the surface of the each petri dish containing CHO FIp-In cells in F12 media+10% FCS. The plates were gently rolled to ensure good mixing and left for 24 hrs @ 37° C./5% CO2. The next day media was exchanged for selective media containing hygromycin B @ 600 ug/ml. Cells were routinely kept at 60% confluency or less. Cells were left to grow in the presence of 600 ug/ml hygromycin B until control plate cells (non transfected cells) had died (i.e. no hygromycin resistance).

[0489] Testing Expression from Stable CHO Cell Lines

[0490] Confluent CHO FIp-In cell lines expressing the protein of interest were grown in 75 cm2 flasks for approximately 3-4 days in serum free media, at which point samples were taken and mixed with an equal volume of Laemmli loading buffer in the presence or absence of 25 mM DTT and heated at 65 C for 15 minutes. Samples were analysed by SDS-PAGE and transferred to a PVDF membrane. After blocking in 5% (w/v) Milk protein in PBS-0.05% (v/v) Tween 20, sample detection was carried out using a specific anti-GH antibody together with a Horse Radish Peroxidase (HRP) conjugated secondary antibody. Visualisation was by chemiluminesence on photographic film using an HRP detection kit.

[0491] Testing Expression from Transient Tansfections

[0492] CHO Flp-In cells were seeded at 0.25×10E6 cells per well of a 6 well plate in a total volume of 2 ml media (DMEM, F12, 10% FCS+P/S+L-glutamine+Zeocin). Cells were left to grow o/n. Cells were then transfected using either TranslT-CHO Reagent (Mirus) or fugene-6 at the specified reagent ratios stated in table 1. Briefly, if using TransiT reagent, 200 ul of Serum free media (OPTI MEM) was added to a 1.5 ml eppendorff per transfection followed by 2 ug DNA. The tubes were left for 15 minutes at RmT. 1 ul of CHO Mojo Reagent was then added, mixed and left for a further 15 minutes. Media was changed to serum free and the transfection mix pippetted dropwise onto the surface of the appropriate well. Briefly, if using Fugene-6 reagent, 94 ul of Serum free media (OPTI MEM) was added to a 1.5 ml eppendorff per transfection followed by 2 ug DNA. The tubes were left for 15 minutes at RmT. Trasfection mix was then pippetted drop wise onto the surface of the appropriate well containing serum free media. All plate were left @ 37 degC./5% CO2 for 2-3 days. If required, samples were concentrated using acetone precipitation.

1. A fusion polypeptide comprising a first polypeptide which is a cytokine and a second polypeptide which is the extracellular domain of the cognate receptor to which the cytokine binds, wherein the cytokine polypeptide and extracellular domain of the cognate receptor are linked indirectly by a peptide linker, and wherein said peptide linker is modified to include at least one motif for the addition of at least one sugar moiety.

2-19. (canceled)

20. A fusion polypeptide according to claim 1 wherein said peptide linker molecule comprises one copy of the glycosylation motif Asn-Xaa-Ser or Asn-Xaa-Thr where X is any amino acid except proline.

21. A fusion polypeptide according to claim 20 wherein said peptide linker molecule comprises at least one copy of the motif (Xaa₁ Xaa₂ Xaa₃ Xaa₄ Xaa₅) wherein said motif comprises the glycosylation motif Asn-Xaa-Ser or Asn-Xaa-Thr.

22. A fusion polypeptide according to claim 21 wherein said peptide linker comprises at least one copy of an amino acid motif selected from the group consisting of:
Asn₁-Xaa₂-Ser₃ Xaa₄ Xaa₅ wherein Xaa₂ is any amino acid except proline;
Xaa₁ Asn₂-Xaa₃-Ser₄ Xaa₅ wherein Xaa₃ is any amino acid except proline;
Xaa₁ Xaa₂ Asn₃-Xaa₄-Ser₅ wherein Xaa₄ is any amino acid except proline;
Asn₁-Xaa₂-Thr₃ Xaa₄ Xaa₅ wherein Xaa₂ is any amino acid except proline;
Xaa₁ Asn₂-Xaa₃-Thr₄ Xaa₅ wherein Xaa₃ is any amino acid except proline; and
Xaa₁ Xaa₂ Asn₃-Xaa₄-Thr₅ wherein Xaa₄ is any amino acid except proline.

23. A fusion polypeptide according to claim 21 wherein said peptide linker comprises at least one copy of a motif selected from the group consisting of:
Asn₁-Xaa₂-Ser₃ Gly₄ Ser₅ wherein Xaa₂ is any amino acid except proline;
Gly₁ Asn₂-Xaa₃-Ser₄ Ser₅ wherein Xaa₃ is any amino acid except proline;
Gly₁ Gly₂ Asn₃-Xaa₄-Ser₅ wherein Xaa₄ is any amino acid except proline;
Asn₁-Xaa₂-Thr₃ Gly₄ Ser₅ wherein Xaa₂ is any amino acid except proline;
Gly₁ Asn₂-Xaa₃-Thr₄ Ser₅ wherein Xaa₃ is any amino acid except proline; and
Gly₁ Gly₂ Asn₃-Xaa₄-Thr₅ wherein Xaa₄ is any amino acid except proline.

24. A fusion polypeptide according to claim 21 wherein said peptide linker comprises at least one copy of a motif selected from the group consisting of:
Asn₁-Xaa₂-Ser₃ Ser₄ Gly₅ wherein Xaa₂ is any amino acid except proline;
Ser₁ Asn₂-Xaa₃-Ser₄ Gly₅ wherein Xaa₃ is any amino acid except proline;
Ser₁ Ser₂ Asn₃-Xaa₄-Ser₅ wherein Xaa₄ is any amino acid except proline;
Asn₁-Xaa₂-Thr₃ Ser₄ Gly₅ wherein Xaa₂ is any amino acid except proline;
Ser₁ Asn₂-Xaa₃-Thr₄ Gly₅ wherein Xaa₃ is any amino acid except proline; and
Ser₁ Ser₂ Asn₃-Xaa₄-Thr₅ wherein Xaa₄ is any amino acid except proline.

25. A fusion polypeptide according to claim 21 wherein said peptide linker molecule comprises at least one copy of the motif (Xaa₁ Xaa₂ Xaa₃ Xaa₄ Xaa₅) wherein said motif comprises the glycosylation motif Asn-Xaa-Ser or Asn-Xaa-Thr and at least one copy of the motif (Gly Gly Gly Gly Ser) wherein said peptide linker is 5-50 amino acids.

26. A fusion polypeptide according to claim 21 wherein said peptide linker comprises at least one copy of the motif (Xaa₁ Xaa₂ Xaa₃ Xaa₄ Xaa₅) wherein said motif comprises the glycosylation motif Asn-Xaa-Ser or Asn-Xaa-Thr and a copy of the motif (Ser Ser Ser Ser Gly) wherein said peptide linker is 5-50 amino acids.

27. A nucleic acid molecule that encodes a polypeptide according to claim 1.

28. A vector comprising the nucleic acid molecule according to claim 27.

29. An isolated host cell transfected or transformed with a nucleic acid molecule or vector according to claim 28.

30. A pharmaceutical composition comprising a polypeptide according to claim 1 and an excipient or carrier.

31-69. (canceled)

70. A fusion polypeptide according to claim 20 wherein the cytokine is selected from the group consisting of: growth hormone, erythropoietin, granulocyte colony stimulating hormone, a type 1 interferon, interleukin 2, leptin and prolactin.

71. A fusion polypeptide according to claim 70 wherein said polypeptide comprises an amino acid sequence selected from the group consisting of the sequences represented in FIGS. 46a, 46b, 46c, 46d, 46e, 46f, 47a, 47b, 47c, 47d, 47e 47f, 48a, 48b, 48c, 48d, 48e, 48f, 49a, 49b, 49c, 49d, 49e, 49f, 50a, 50b, 50c, 50d, 50h, 51a, 51b, 51c, 51d, 51e, 51f, 51h, 52a, 52b, 52c, 52d, 52e, 52f, 52h, 53a, 53b, 53c, 53d, 53e, 53f amd 53h.

72. A fusion polypeptide according to claim 70 wherein said polypeptide comprises an amino acid sequence selected from the group consisting of the sequences represented in FIGS. 54a, 54b, 55a, 55b, 56a, 56b, 57a and 57b.

73. A fusion polypeptide according to claim 70 wherein said polypeptide comprises an amino acid sequence selected from the group consisting of the sequences represented in FIGS. 58a, 58b, 58c, 58d, 58e, 58f, 59a, 59a, 59b, 59c, 59d, 59e, 59f, 60a, 60b, 60c, 60d, 60e, 60f, 61a, 61b, 61c, 61d, 61e and 61f.

74. A fusion polypeptide according to claim 70 wherein said polypeptide comprises an amino acid sequence selected from the group consisting of the sequences represented in FIGS. 62a, 62b, 62c, 62d, 62e, 63a, 63b, 63c, 63d, 63e, 64a, 64b, 64c, 64d, 64e, 65a, 65b, 65c, 65d, 65e, 66a, 66b, 66c, 66d, 66e and 66f.

75. A fusion polypeptide according to claim 70 wherein said polypeptide comprises an amino acid sequence selected from the group consisting of the sequences represented in FIGS. 70a, 70b, 70c, 70d, 70e, 70f, 70g, 70h, 70i, 70j, 70k, 70m, 70n, 70o, 70p, 71a, 71b, 71c, 71d, 71e, 71f, 71g, 71h, 71i, 71j, 71k, 71m, 71n, 71o, 71p, 72a, 72b, 72c, 72d, 72e, 72f, 72g, 72h, 72i, 72j, 72k, 72m, 72n, 72o, 72p, 73a, 73b, 73c, 73d, 73e, 73f, 73g, 73h, 73i, 73j, 73k, 73m, 73n, 73o and 73p.

76. A fusion polypeptide according to claim 70 wherein said polypeptide comprises an amino acid sequence selected from the group consisting of the sequences represented in FIGS. 74a, 74b, 74c, 74d, 74e, 74f, 74g, 74h, 74i, 74j, 74k, 74m, 75a, 75b, 75c, 75d, 75e, 75f, 75g, 75h, 75i, 75j, 75k, 75m, 76a, 76b, 76c, 76d, 76e, 76f, 76g, 76h, 76i, 76j, 76k, 76m, 77a, 77b, 77c, 77d, 77e, 77f, 77g, 77h, 77i, 77j, 77k and 77m.

77. A fusion polypeptide according to claim 70 wherein said polypeptide comprises an amino acid sequence selected from the group consisting of the sequences represented in FIGS. 78a, 78b, 78c, 79a, 79b, 79c, 80a, 80b, 80c, 81a, 81b and 81c.

The application's sequence listing, which the Patent Office published only in electronic form, follows.

SEQUENCE LISTING (353 sequences)

SEQ ID NO: 1 - protein, 70 aa, Homo sapiens
GPETLCGAELVDALQFVCGDRGFYFNKPTGYGSSSRRAPQTGIVDECCFRSCDLRRLEMYCAPLKPAKSA

SEQ ID NO: 2 - protein, 905 aa, Homo sapiens
EICGPGIDIRNDYQQLKRLENCTVIEGYLHILLISKAEDYRSYRFPKLTVITEYLLLFRVAGLESLGDLFPNLTVIRGWKLFYNYALVIFEMTNLKDIGLYNLRNITRGAIRIEKNADLCYLSTVDWSLILDAVSNNYIVGNKPPKECGDLCPGTMEEKPMCEKTTINNEYNYRCWTTNRCQKMCPSTCGKRACTENNECCHPECLGSCSAPDNDTACVACRHYYYAGVCVPACPPNTYRFEGWRCVDRDFCANILSAESSDSEGFVIHDGECMQECPSGFIRNGSQSMYCIPCEGPCPKVCEEEKKTKTIDSVTSAQMLQGCTIFKGNLLINIRRGNNIASELENFMGLIEVVTGYVKIRHSHALVSLSFLKNLRLILGEEQLEGNYSFYVLDNQNLQQLWDWDHRNLTIKAGKMYFAFNPKLCVSEIYRMEEVTGTKGRQSKGDINTRNNGERASCESDVLHFTSTTTSKNRIIITWHRYRPPDYRDLISFTVYYKEAPFKNVTEYDGQDACGSNSWNMVDVDLPPNKDVEPGILLHGLKPWTQYAVYVKAVTLTMVENDHIRGAKSEILYIRTNASVPSIPLDVLSASNSSSQLIVKWNPPSLPNGNLSYYIVRWQRQPQDGYLYRHNYCSKDKIPIRKYADGTIDIEEVTENPKTEVCGGEKGPCCACPKTEAEKQAEKEEAEYRKVFENFLHNSIFVPRPERKRRDVMQVANTTMSSRSRNTTAADTYNITDPEELETEYPFFESRVDNKERTVISNLRPFTLYRIDIHSCNHEAEKLGCSASNFVFARTMPAEGADDIPGPVTWEPRPENSIFLKWPEPENPNGLILMYEIKYGSQVEDQRECVSRQEYRKYGGAKLNRLNPGNYTARIQATSLSGNGSWTDPVFFYVQAKTGYENFIH

SEQ ID NO: 3 - protein, 66 aa, Homo sapiens
AYRPSETLCGGELVDTLQFVCGDRGFYFSRPASRVSRRSRGIVEECCFRSCDLALLETYCATPAKS

SEQ ID NO: 4 - protein, 2264 aa, Homo sapiens
QAAPFPELCSYTWEAVDTKNNVLYKINICGSVDIVQCGPSSAVCMHDLKTRTYHSVGDSVLRSATRSLLEFNTTVSCDQQGTNHRVQSSIAFLCGKTLGTPEFVTATECVHYFEWRTTAACKKDIFKANKEVPCYVFDEELRKHDLNPLIKLSGAYLVDDSDPDTSLFINVCRDIDTLRDPGSQLRACPPGTAACLVRGHQAFDVGQPRDGLKLVRKDRLVLSYVREEAGKLDFCDGHSPAVTITFVCPSERREGTIPKLTAKSNCRYEIEWITEYACHRDYLESKTCSLSGEQQDVSIDLTPLAQSGGSSYISDGKEYLFYLNVCGETEIQFCNKKQAAVCQVKKSDTSQVKAAGRYHNQTLRYSDGDLTLIYFGGDECSSGFQRMSVINFECNKTAGNDGKGTPVFTGEVDCTYFFTWDTEYACVKEKEDLLCGATDGKKRYDLSALVRHAEPEQNWEAVDGSQTETEKKHFFINICHRVLQEGKARGCPEDAAVCAVDKNGSKNLGKFISSPMKEKGNIQLSYSDGDDCGHGKKIKTNITLVCKPGDLESAPVLRTSGEGGCFYEFEWHTAAACVLSKTEGENCTVFDSQAGFSFDLSPLTKKNGAYKVETKKYDFYINVCGPVSVSPCQPDSGACQVAKSDEKTWNLGLSNAKLSYYDGMIQLNYRGGTPYNNERHTPRATLITFLCDRDAGVGFPEYQEEDNSTYNFRWYTSYACPEEPLECVVTDPSTLEQYDLSSLAKSEGGLGGNWYAMDNSGEHVTWRKYYINVCRPLNPVPGCNRYASACQMKYEKDQGSFTEVVSISNLGMAKTGPVVEDSGSLLLEYVNGSACTTSDGRQTTYTTRIHLVCSRGRLNSHPIFSLNWECVVSFLWNTEAACPIQTTTDTDQACSIRDPNSGFVFNLNPLNSSQGYNVSGIGKIFMFNVCGTMPVCGTILGKPASGCEAETQTEELKNWKPARPVGIEKSLQLSTEGFITLTYKGPLSAKGTADAFIVRFVCNDDVYSGPLKFLHQDIDSGQGIRNTYFEFETALACVPSPVDCQVTDLAGNEYDLTGLSTVRKPWTAVDTSVDGRKRTFYLSVCNPLPYIPGCQGSAVGSCLVSEGNSWNLGVVQMSPQAAANGSLSIMYVNGDKCGNQRFSTRITFECAQISGSPAFQLQDGCEYVFIWRTVEACPVVRVEGDNCEVKDPRHGNLYDLKPLGLNDTIVSAGEYTYYFRVCGKLSSDVCPTSDKSKVVSSCQEKREPQGFHKVAGLLTQKLTYENGLLKMNFTGGDTCHKVYQRSTAIFFYCDRGTQRPVFLKETSDCSYLFEWRTQYACPPFDLTECSFKDGAGNSFDLSSLSRYSDNWEAITGTGDPEHYLINVCKSLAPQAGTEPCPPEAAACLLGGSKPVNLGRVRDGPQWRDGIIVLKYVDGDLCPDGIRKKSTTIRFTCSESQVNSRPMFISAVEDCEYTFAWPTATACPMKSNEHDDCQVTNPSTGHLFDLSSLSGRAGFTAAYSEKGLVYMSICGENENCPPGVGACFGQTRISVGKANKRLRYVDQVLQLVYKDGSPCPSKSGLSYKSVISFVCRPEAGPTNRPMLISLDKQTCTLFFSWHTPLACEQATECSVRNGSSIVDLSPLIHRTGGYEAYDESEDDASDTNPDFYINICQPLNPMHGVPCPAGAAVCKVPIDGPPIDIGRVAGPPILNPIANEIYLNFESSTPCLADKHFNYTSLIAFHCKRGVSMGTPKLLRTSECDFVFEWETPVVCPDEVRMDGCTLTDEQLLYSFNLSSLSTSTFKVTRDSRTYSVGVCTFAVGPEQGGCKDGGVCLLSGTKGASFGRLQSMKLDYRHQDEAVVLSYVNGDRCPPETDDGVPCVFPFIFNGKSYEECIIESRAKLWCSTTADYDRDHEWGFCRHSNSYRTSSIIFKCDEDEDIGRPQVFSEVRGCDVTFEWKTKVVCPPKKLECKFVQKHKTYDLRLLSSLTGSWSLVHNGVSYYINLCQKIYKGPLGCSERASICRRTTTGDVQVLGLVHTQKLGVIGDKVVVTYSKGYPCGGNKTASSVIELTCTKTVGRPAFKRFDIDSCTYYFSWDSRAACAVKPQEVQMVNGTITNPINGKSFSLGDIYFKLFRASGDMRTNGDNYLYEIQLSSITSSRNPACSGANICQVKPNDQHFSRKVGTSDKTKYYLQDGDLDVVFASSSKCGKDKTKSVSSTIFFHCDPLVEDGIPEFSHETADCQYLFSWYTSAVCPLGVGFDSENPGDDGQMHKGLSERSQ

SEQ ID NO: 5 - protein, 143 aa, Homo sapiens
MKSNEHDDCQVTNPSTGHLFDLSSLSGRAGFTAAYSEKGLVYMSICGENENCPPGVGACFGQTRISVGKANKRLRYVDQVLQLVYKDGSPCPSKSGLSYKSVISFVCRPEAGPTNRPMLISLDKQTCTLFFSWHTPLACEQAT

SEQ ID NO: 6 - protein, 191 aa, Homo sapiens [sequence omitted]

SEQ ID NO: 7 - protein, 238 aa, Homo sapiens [sequence omitted]

SEQ ID NO: 8 - protein, 146 aa, Homo sapiens
VPIQKVQDDTKTLIKTIVTRINDISHTQSVSSKQKVTGLDFIPGLHPILTLSKMDQTLAVYQQILTSMPSRNVIQISNDLENLRDLLHVLAFSKSCHLPWASGLETLDSLGGVLEASGYSTEVVALSRLQGSLQDMLWQLDLSPGC

SEQ ID NO: 9 - protein, 818 aa, Homo sapiens
FNLSYPITPWRFKLSCMPPNSTYDYFLLPAGLSKNTSNSNGHYETAVEPKFNSSGTHFSNLSKTTFHCCFRSEQDRNCSLCADNIEGKTFVSTVNSLVFQQIDANWNIQCWLKGDLKLFICYVESLFKNLFRNYNYKVHLLYVLPEVLEDSPLVPQKGSFQMVHCNCSVHECCECLVPVPTAKLNDTLLMCLKITSGGVIFQSPLMSVQPINMVKPDPPLGLHMEITDDGNLKISWSSPPLVPFPLQYQVKYSENSTTVIREADKIVSATSLLVDSILPGSSYEVQVRGKRLDGPGIWSDWSTPRVFTTQDVIYFPPKILTSVGSNVSFHCIYKKENKIVPSKEIVWWMNLAEKIPQSQYDVVSDHVSKVTFFNLNETKPRGKFTYDAVYCCNEHECHHRYAELYVIDVNINISCETDGYLTKMTCRWSTSTIQSLAESTLQLRYHRSSLYCSDIPSIHPISEPKDCYLQSDGFYECIFQPIFLLSGYTMWIRINHSLGSLDSPPTCVLPDSVVKPLPPSSVKAEITINIGLLKISWEKPVFPENNLQFQIRYGLSGKEVQWKMYEVYDAKSKSVSLPVPDLCAVYAVQVRCKRLDGLGYWSNWSNPAYTVVMDIKVPMRGPEFWRIINGDTMKKEKNVTLLWKPLMKNDSLCSVQRYVINHHTSCNGTWSEDVGNHTKFTFLWTEQAHTVTVLAINSIGASVANFNLTFSWPMSKVNIVQSLSAYPLNSSCVIVSWILSPSDYKLMYFIIEWKNLNEDGEIKWLRISSSVKKYYIHDHFIPIEKYQFSLYPIFMEGVGKPKIINSFTQDDIEKHQSD

SEQ ID NO: 10 - protein, 166 aa, Homo sapiens
APPRLICDSRVLERYLLEAKEAENITTGCAEHCSLNENITVPDTKVNFYAWKRMEVGQQAVEVWQGLALLSEAVLRGQALLVNSSQPWEPLQLHVDKAVSGLRSLTTLLRALGAQKEAISPPDAASAAPLRTITADTFRKLFRVYSNFLRGKLKLYTGEACRTGDR

SEQ ID NO: 11 - protein, 220 aa, Homo sapiens
APPPNLPDPKFESKAALLAARGPEELLCFTERLEDLVCFWEEAASAGVGPGNYSFSYQLEDEPWKLCRLHQAPTARGAVRFWCSLPTADTSSFVPLELRVTAASGAPRYHRVIHINEVVLLDAPVGLVARLADESGHVVLRWLPPPETPMTSHIRYEVDVSAGNGAGSVQRVEILEGRTECVLSNLRGRTRYTFAVRARMAEPSFGGFWSAWSEPVSLLT

SEQ ID NO: 12 - protein, 199 aa, Homo sapiens
LPICPGGAARCQVTLRDLFDRAVVLSHYIHNLSSEMFSEFDKRYTHGRGFITKAINSCHTSSLATPEDKEQAQQMNQKDFLSLIVSILRSWNEPLYHLVTEVRGMQEAPEAILSKAVEIEEQTKRLLEGMELIVSQVHPETKENEIYPVWSGLPSLQMADEESRLSAYYNLLHCLRRDSHKIDNYLKLLKCRIIHNNNC

SEQ ID NO: 13 - protein, 210 aa, Homo sapiens
QLPPGKPEIFKCRSPNKETFTCWWRPGTDGGLPTNYSLTYHREGETLMHECPDYITGGPNSCHFGKQYTSMWRTYIMMVNATNQMGSSFSDELYVDVTYIVQPDPPLELAVEVKQPEDRKPYLWIKWSPPTLIDLKTGWFTLLYEIRLKPEKAAEWEIHFAGQQTEFKILSLHPGQKYLVQVRCKPDHGYWSAWSPATFIQIPSDFTMND

SEQ ID NO: 14 - protein, 174 aa, Homo sapiens
TPLGPASSLPQSFLLKCLEQVRKIQGDGAALQEKLCATYKLCHPEELVLLGHSLGIPWAPLSSCPSQALQLAGCLSQLHSGLFLYQGLLQALEGISPELGPTLDTLQLDVADFATTIWQQMEELGMAPALQPTQGAMPAFASAFQRRAGGVLVASHLQSFLEVSYRVLRHLAQP

SEQ ID NO: 15 - protein, 307 aa, Homo sapiens
ECGHISVSAPIVHLGDPITASCIIKQNCSHLDPEPQILWRLGAELQPGGRQQRLSDGTQESIITLPHLNHTQAFLSCCLNWGNSLQILDQVELRAGYPPAIPHNLSCLMNLTTSSLICQWEPGPETHLPTSFTLKSFKSRGNCQTQGDSILDCVPKDGQSHCCIPRKHLLLYQNMGIWVQAENALGTSMSPQLCLDPMDVVKLEPPMLRTMDPSPEAAPPQAGCLQLCWEPWQPGLHINQKCELRHKPQRGEASWALVGPLPLEALQYELCGLLPATAYTLQIRCIRWPLPGHWSDWSPSLELRTTE

SEQ ID NO: 16 - protein, 391 aa, Homo sapiens
MFPNGTASSPSSSPSPSPGSCGEGGGSRGPGAGAADGMEEPGRNASQNGTLSEGQGSAILISFIYSVVCLVGLCGNSMVIYVILRYAKMKTATNIYILNLAIADELLMLSVPFLVTSTLLRHWPFGALLCRLVLSVDAVNMFTSIYCLTVLSVDRYVAVVHPIKAARYRRPTVAKVVNLGVWVLSLLVILPIVVFSRTAANSDGTVACNMLMPEPAQRWLVGFVLYTFLMGFLLPVGAICLCYVLIIAKMRMVALKAGWQQRKRSERKITLMVMMVVMVFVICWMPFYVVQLVNVFAEQDDATVSQLSVILGYANSCANPILYGFLSDNFKRSFQRILCLSWMDNAAEEPVDYYATALKSRAYSVEDFQPENLESGGVFRNGTCTSRITTL

SEQ ID NO: 17 - protein, 92 aa, Homo sapiens
APDVQDCPECTLQENPFFSQPGAPILQCMGCCFSRAYPTPLRSKKTMLVQKNVTSESTCCVAKSYNRVTVMGGFKVENHTACHCSTCYYHKS

SEQ ID NO: 18 - protein, 112 aa, Homo sapiens
CNSCELTNITIAIEKEECRFCISINTTWCAGYCYTRDLVYKDPARPKIQKTCTFKELVYETVRVPGCAHHADSLYTYPVATQCHCGKCDSDSTDCTVRGLGPSYCSFGEMKE

SEQ ID NO: 19 - protein, 695 aa, Homo sapiens [sequence omitted]

SEQ ID NO: 20 - protein, 121 aa, Homo sapiens
SREPLRPWCHPINAILAVEKEGCPVCITVNTTICAGYCPTMMRVLQAVLPPLPQVVCTYRDVRFESIRLPGCPRGVDPVVSFPVALSCRCGPCRRSTSDCGGPKDHPLTCDHPQLSGLLFL

SEQ ID NO: 21 - protein, 699 aa, Homo sapiens [sequence omitted]

SEQ ID NO: 22 - protein, 118 aa, Homo sapiens
FCIPTEYTMHIERRECAYCLTINTTICAGYCMTRDINGKLFLPKYALSQDVCTYRDFIYRTVEIPGCPLHVAPYFSYPVALSCKCGKCNTDYSDCIHEAIKTNYCTKPQKSYLVGFSV

SEQ ID NO: 23 - protein, 764 aa, Homo sapiens
MRPADLLQLVLLLDLPRDLGGMGCSSPPCECHQEEDFRVTCKDIQRIPSLPPSTQTLKLIETHLRTIPSHAFSNLPNISRIYVSIDVTLQQLESHSFYNLSKVTHIEIRNTRNLTYIDPDALKELPLLKFLGIFNTGLKMFPDLTKVYSTDIFFILEITDNPYMTSIPVNAFQGLCNETLTLKLYNNGFTSVQGYAFNGTKLDAVYLNKNKYLTVIDKDAFGGVYSGPSLLDVSQTSVTALPSKGLEHLKELIARNTWTLKKLPLSLSFLHLTRADLSYPSHCCAFKNQKKIRGILESLMCNESSMQSLRQRKSVNALNSPLHQEYEENLGDSIVGYKEKSKFQDTHNNAHYYVFFEEQEDEIIGFGQELKNPQEETLQAFDSHYDYTICGDSEDMVCTPKSDEFNPCEDIMGYKFLRIVVWFVSLLALLGNVFVLLILLTSHYKLNVPRFLMCNLAFADFCMGMYLLLIASVDLYTHSEYYNHAIDWQTGPGCNTAGFFTVFASELSVYTLTVITLERWYAITFAMRLDRKIRLRHACAIMVGGWVCCFLLALLPLVGISSYAKVSICLPMDTETPLALAYIVFVLTLNIVAFVIVCCCYVKIYITVRNPQYNPGDKDTKIAKRMAVLIFTDFICMAPISFYALSAILNKPLITVSNSKILLVLFYPLNSCANPFLYAIFTKAFQRDVFILLSKFGICKRQAQAYRGQRVPPKNSTDIQVQKVTHDMRQGLHNMEDVYELIENSHLTPKKQGQISEEYMQTVL

SEQ ID NO: 24 - DNA, 1299 bp, Artificial
  synthesized growth hormone fused in tandem
atggctacaggctcccggacgtccctgctcctggcttttggcctgctctgcctgccctggcttcaagagggcagtgccttcccaaccattcccttatccaggctttttgacaacgctatgctccgcgcccatcgtctgcaccagctggcctttgacacctaccaggagtttgaagaagcctatatcccaaaggaacagaagtattcattcctgcagaacccccagacctccctctgtttctcagagtctattccgacaccctccaacagggaggaaacacaacagaaatccaacctagagctgctccgcatctccctgctgctcatccagtcgtggctggagcccgtgcagttcctcaggagtgtcttcgccaacagcctggtgtacggcgcctctgacagcaacgtctatgacctcctaaaggacctagaggaaggcatccaaacgctgatggggaggctggaagatggcagcccccggactgggcagatcttcaagcagacctacagcaagttcgacacaaactcacacaacgatgacgcactactcaagaactacgggctgctctactgcttcaggaaggacatggacaaggtcgagacattcctgcgcatcgtgcagtgccgctctgtggagggcagctgtggcttcggtggcggaggtagtggtggcggaggtagcggtggcaatggttctggtggcggaggttccggtggcggaggtagtttcccaaccattcccttatccaggctttttgacaacgctatgctccgcgcccatcgtctgcaccagctggcctttgacacctaccaggagtttgaagaagcctatatcccaaaggaacagaagtattcattcctgcagaacccccagacctccctctgtttctcagagtctattccgacaccctccaacagggaggaaacacaacagaaatccaacctagagctgctccgcatctccctgctgctcatccagtcgtggctggagcccgtgcagttcctcaggagtgtcttcgccaacagcctggtgtacggcgcctctgacagcaacgtctatgacctcctaaaggacctagaggaaggcatccaaacgctgatggggaggctggaagatggcagcccccggactgggcagatcttcaagcagacctacagcaagttcgacacaaactcacacaacgatgacgcactactcaagaactacgggctgctctactgcttcaggaaggacatggacaaggtcgagacattcctgcgcatcgtgcagtgccgctctgtggagggcagctgtggcttc

SEQ ID NO: 25 - protein, 407 aa, Artificial
  synthesized growth hormone tandem polypeptide
FPTIPLSRLFDNAMLRAHRLHQLAFDTYQEFEEAYIPKEQKYSFLQNPQTSLCFSESIPTPSNREETQQKSNLELLRISLLLIQSWLEPVQFLRSVFANSLVYGASDSNVYDLLKDLEEGIQTLMGRLEDGSPRTGQIFKQTYSKFDTNSHNDDALLKNYGLLYCFRKDMDKVETFLRIVQCRSVEGSCGFGGGGSGGGGSGGNGSGGGGSGGGGSFPTIPLSRLFDNAMLRAHRLHQLAFDTYQEFEEAYIPKEQKYSFLQNPQTSLCFSESIPTPSNREETQQKSNLELLRISLLLIQSWLEPVQFLRSVFANSLVYGASDSNVYDLLKDLEEGIQTLMGRLEDGSPRTGQIFKQTYSKFDTNSHNDDALLKNYGLLYCFRKDMDKVETFLRIVQCRSVEGSCGF

SEQ ID NO: 26 - DNA, 1299 bp, Artificial
  synthesized growth hormone fused in tandem
atggctacaggctcccggacgtccctgctcctggcttttggcctgctctgcctgccctggcttcaagagggcagtgccttcccaaccattcccttatccaggctttttgacaacgctatgctccgcgcccatcgtctgcaccagctggcctttgacacctaccaggagtttgaagaagcctatatcccaaaggaacagaagtattcattcctgcagaacccccagacctccctctgtttctcagagtctattccgacaccctccaacagggaggaaacacaacagaaatccaacctagagctgctccgcatctccctgctgctcatccagtcgtggctggagcccgtgcagttcctcaggagtgtcttcgccaacagcctggtgtacggcgcctctgacagcaacgtctatgacctcctaaaggacctagaggaaggcatccaaacgctgatggggaggctggaagatggcagcccccggactgggcagatcttcaagcagacctacagcaagttcgacacaaactcacacaacgatgacgcactactcaagaactacgggctgctctactgcttcaggaaggacatggacaaggtcgagacattcctgcgcatcgtgcagtgccgctctgtggagggcagctgtggcttcggtggcggaggtagtggtggcggaggtagcggtggcaatggtaccggtggcggaggttccggtggcggaggtagtttcccaaccattcccttatccaggctttttgacaacgctatgctccgcgcccatcgtctgcaccagctggcctttgacacctaccaggagtttgaagaagcctatatcccaaaggaacagaagtattcattcctgcagaacccccagacctccctctgtttctcagagtctattccgacaccctccaacagggaggaaacacaacagaaatccaacctagagctgctccgcatctccctgctgctcatccagtcgtggctggagcccgtgcagttcctcaggagtgtcttcgccaacagcctggtgtacggcgcctctgacagcaacgtctatgacctcctaaaggacctagaggaaggcatccaaacgctgatggggaggctggaagatggcagcccccggactgggcagatcttcaagcagacctacagcaagttcgacacaaactcacacaacgatgacgcactactcaagaactacgggctgctctactgcttcaggaaggacatggacaaggtcgagacattcctgcgcatcgtgcagtgccgctctgtggagggcagctgtggcttc

SEQ ID NO: 27 - protein, 407 aa, Artificial
  synthesized growth hormone fused in tandem
FPTIPLSRLFDNAMLRAHRLHQLAFDTYQEFEEAYIPKEQKYSFLQNPQTSLCFSESIPTPSNREETQQKSNLELLRISLLLIQSWLEPVQFLRSVFANSLVYGASDSNVYDLLKDLEEGIQTLMGRLEDGSPRTGQIFKQTYSKFDTNSHNDDALLKNYGLLYCFRKDMDKVETFLRIVQCRSVEGSCGFGGGGSGGGGSGGNGTGGGGSGGGGSFPTIPLSRLFDNAMLRAHRLHQLAFDTYQEFEEAYIPKEQKYSFLQNPQTSLCFSESIPTPSNREETQQKSNLELLRISLLLIQSWLEPVQFLRSVFANSLVYGASDSNVYDLLKDLEEGIQTLMGRLEDGSPRTGQIFKQTYSKFDTNSHNDDALLKNYGLLYCFRKDMDKVETFLRIVQCRSVEGSCGF

SEQ ID NO: 28 - DNA, 1299 bp, Artificial
  synthesized growth hormone fused in tandem
atggctacaggctcccggacgtccctgctcctggcttttggcctgctctgcctgccctggcttcaagagggcagtgccttcccaaccattcccttatccaggctttttgacaacgctatgctccgcgcccatcgtctgcaccagctggcctttgacacctaccaggagtttgaagaagcctatatcccaaaggaacagaagtattcattcctgcagaacccccagacctccctctgtttctcagagtctattccgacaccctccaacagggaggaaacacaacagaaatccaacctagagctgctccgcatctccctgctgctcatccagtcgtggctggagcccgtgcagttcctcaggagtgtcttcgccaacagcctggtgtacggcgcctctgacagcaacgtctatgacctcctaaaggacctagaggaaggcatccaaacgctgatggggaggctggaagatggcagcccccggactgggcagatcttcaagcagacctacagcaagttcgacacaaactcacacaacgatgacgcactactcaagaactacgggctgctctactgcttcaggaaggacatggacaaggtcgagacattcctgcgcatcgtgcagtgccgctctgtggagggcagctgtggcttcggtggcggaggtagtggtggcggaggtagcggttggaatggttctggtggcggaggttccggtggcggaggtagtttcccaaccattcccttatccaggctttttgacaacgctatgctccgcgcccatcgtctgcaccagctggcctttgacacctaccaggagtttgaagaagcctatatcccaaaggaacagaagtattcattcctgcagaacccccagacctccctctgtttctcagagtctattccgacaccctccaacagggaggaaacacaacagaaatccaacctagagctgctccgcatctccctgctgctcatccagtcgtggctggagcccgtgcagttcctcaggagtgtcttcgccaacagcctggtgtacggcgcctctgacagcaacgtctatgacctcctaaaggacctagaggaaggcatccaaacgctgatggggaggctggaagatggcagcccccggactgggcagatcttcaagcagacctacagcaagttcgacacaaactcacacaacgatgacgcactactcaagaactacgggctgctctactgcttcaggaaggacatggacaaggtcgagacattcctgcgcatcgtgcagtgccgctctgtggagggcagctgtggcttc

SEQ ID NO: 29 - protein, 407 aa, Artificial
  synthesized growth hormone fused in tandem
FPTIPLSRLFDNAMLRAHRLHQLAFDTYQEFEEAYIPKEQKYSFLQNPQTSLCFSESIPTPSNREETQQKSNLELLRISLLLIQSWLEPVQFLRSVFANSLVYGASDSNVYDLLKDLEEGIQTLMGRLEDGSPRTGQIFKQTYSKFDTNSHNDDALLKNYGLLYCFRKDMDKVETFLRIVQCRSVEGSCGFGGGGSGGGGSGWNGSGGGGSGGGGSFPTIPLSRLFDNAMLRAHRLHQLAFDTYQEFEEAYIPKEQKYSFLQNPQTSLCFSESIPTPSNREETQQKSNLELLRISLLLIQSWLEPVQFLRSVFANSLVYGASDSNVYDLLKDLEEGIQTLMGRLEDGSPRTGQIFKQTYSKFDTNSHNDDALLKNYGLLYCFRKDMDKVETFLRIVQCRSVEGSCGF

SEQ ID NO: 30 - DNA, 1308 bp, Artificial
  synthesized growth hormone fused in tandem
atggctacaggctcccggacgtccctgctcctggcttttggcctgctctgcctgccctggcttcaagagggcagtgccttcccaaccattcccttatccaggctttttgacaacgctatgctccgcgcccatcgtctgcaccagctggcctttgacacctaccaggagtttgaagaagcctatatcccaaaggaacagaagtattcattcctgcagaacccccagacctccctctgtttctcagagtctattccgacaccctccaacagggaggaaacacaacagaaatccaacctagagctgctccgcatctccctgctgctcatccagtcgtggctggagcccgtgcagttcctcaggagtgtcttcgccaacagcctggtgtacggcgcctctgacagcaacgtctatgacctcctaaaggacctagaggaaggcatccaaacgctgatggggaggctggaagatggcagcccccggactgggcagatcttcaagcagacctacagcaagttcgacacaaactcacacaacgatgacgcactactcaagaactacgggctgctctactgcttcaggaaggacatggacaaggtcgagacattcctgcgcatcgtgcagtgccgctctgtggagggcagctgtggcttcggtggcggaggtagtggtggcggaggtagcaatgccaccggtggcggaggttctggtggcggaggttccggtggcggaggtagtttcccaaccattcccttatccaggctttttgacaacgctatgctccgcgcccatcgtctgcaccagctggcctttgacacctaccaggagtttgaagaagcctatatcccaaaggaacagaagtattcattcctgcagaacccccagacctccctctgtttctcagagtctattccgacaccctccaacagggaggaaacacaacagaaatccaacctagagctgctccgcatctccctgctgctcatccagtcgtggctggagcccgtgcagttcctcaggagtgtcttcgccaacagcctggtgtacggcgcctctgacagcaacgtctatgacctcctaaaggacctagaggaaggcatccaaacgctgatggggaggctggaagatggcagcccccggactgggcagatcttcaagcagacctacagcaagttcgacacaaactcacacaacgatgacgcactactcaagaactacgggctgctctactgcttcaggaaggacatggacaaggtcgagacattcctgcgcatcgtgcagtgccgctctgtggagggcagctgtggcttc

SEQ ID NO: 31 - protein, 410 aa, Artificial
  synthesized growth hormone fused in tandem
FPTIPLSRLFDNAMLRAHRLHQLAFDTYQEFEEAYIPKEQKYSFLQNPQTSLCFSESIPTPSNREETQQKSNLELLRISLLLIQSWLEPVQFLRSVFANSLVYGASDSNVYDLLKDLEEGIQTLMGRLEDGSPRTGQIFKQTYSKFDTNSHNDDALLKNYGLLYCFRKDMDKVETFLRIVQCRSVEGSCGFGGGGSGGGGSNATGGGGSGGGGSGGGGSFPTIPLSRLFDNAMLRAHRLHQLAFDTYQEFEEAYIPKEQKYSFLQNPQTSLCFSESIPTPSNREETQQKSNLELLRISLLLIQSWLEPVQFLRSVFANSLVYGASDSNVYDLLKDLEEGIQTLMGRLEDGSPRTGQIFKQTYSKFDTNSHNDDALLKNYGLLYCFRKDMDKVETFLRIVQCRSVEGSCGF

SEQ ID NO: 32 - DNA, 1293 bp, Artificial
  synthesized interferon beta chimera
atgaccaacaagtgtctcctccaaattgctctcctgttgtgcttctccactacagctctttccatgagctacaacttgcttggattcctacaaagaagcagcaattttcagtgtcagaagctcctgtggcaattgaatgggaggcttgaatactgcctcaaggacaggatgaactttgacatccctgaggagattaagcagctgcagcagttccagaaggaggacgccgcattgaccatctatgagatgctccagaacatctttgctattttcagacaagattcatctagcactggctggaatgagactattgttgagaacctcctggctaatgtctatcatcagataaaccatctgaagacagtcctggaagaaaaactggagaaagaagatttcaccaggggaaaactcatgagcagtctgcacctgaaaagatattatgggaggattctgcattacctgaaggccaaggagtacagtcactgtgcctggaccatagtcagagtggaaatcctaaggaacttttacttcattaacagacttacaggttacctccgaaacggtggcggaggtagtggtggcggaggtagcggtggcaatggttctggtggcggaggttccggtggcggaggtagtatttcatatgattcgcctgattacacagatgaatcttgcactttcaagatatcattgcgaaatttccggtccatcttatcatgggaattaaaaaaccactccattgtaccaactcactatacattgctgtatacaatcatgagtaaaccagaagatttgaaggtggttaagaactgtgcaaataccacaagatcattttgtgacctcacagatgagtggagaagcacacacgaggcctatgtcaccgtcctagaaggattcagcgggaacacaacgttgttcagttgctcacacaatttctggctggccatagacatgtcttttgaaccaccagagtttgagattgttggttttaccaaccacattaatgtggtggtgaaatttccatctattgttgaggaagaattacagtttgatttatctctcgtcattgaagaacagtcagagggaattgttaagaagcataaacccgaaataaaaggaaacatgagtggaaatttcacctatatcattgacaagttaattccaaacacgaactactgtgtatctgtttatttagagcacagtgatgagcaagcagtaataaagtctcccttaaaatgcaccctccttccacctggccaggaatcagaatcagcagaatctgccaaataatga

SEQ ID NO: 33 - protein, 429 aa, Artificial
  synthesized interferon beta chimera
MTNKCLLQIALLLCFSTTALSMSYNLLGFLQRSSNFQCQKLLWQLNGRLEYCLKDRMNFDIPEEIKQLQQFQKEDAALTIYEMLQNIFAIFRQDSSSTGWNETIVENLLANVYHQINHLKTVLEEKLEKEDFTRGKLMSSLHLKRYYGRILHYLKAKEYSHCAWTIVRVEILRNFYFINRLTGYLRNGGGGSGGGGSGGNGSGGGGSGGGGSISYDSPDYTDESCTFKISLRNFRSILSWELKNHSIVPTHYTLLYTIMSKPEDLKVVKNCANTTRSFCDLTDEWRSTHEAYVTVLEGFSGNTTLFSCSHNFWLAIDMSFEPPEFEIVGFTNHINVVVKFPSIVEEELQFDLSLVIEEQSEGIVKKHKPEIKGNMSGNFTYIIDKLIPNTNYCVSVYLEHSDEQAVIKSPLKCTLLPPGQESESAESAK

SEQ ID NO: 34 - DNA, 1293 bp, Artificial
  synthesized interferon beta chimera
atgaccaacaagtgtctcctccaaattgctctcctgttgtgcttctccactacagctctttccatgagctacaacttgcttggattcctacaaagaagcagcaattttcagtgtcagaagctcctgtggcaattgaatgggaggcttgaatactgcctcaaggacaggatgaactttgacatccctgaggagattaagcagctgcagcagttccagaaggaggacgccgcattgaccatctatgagatgctccagaacatctttgctattttcagacaagattcatctagcactggctggaatgagactattgttgagaacctcctggctaatgtctatcatcagataaaccatctgaagacagtcctggaagaaaaactggagaaagaagatttcaccaggggaaaactcatgagcagtctgcacctgaaaagatattatgggaggattctgcattacctgaaggccaaggagtacagtcactgtgcctggaccatagtcagagtggaaatcctaaggaacttttacttcattaacagacttacaggttacctccgaaacggtggcggaggtagtggtggcggaggtagcggtggcaatggtaccggtggcggaggttccggtggcggaggtagtatttcatatgattcgcctgattacacagatgaatcttgcactttcaagatatcattgcgaaatttccggtccatcttatcatgggaattaaaaaaccactccattgtaccaactcactatacattgctgtatacaatcatgagtaaaccagaagatttgaaggtggttaagaactgtgcaaataccacaagatcattttgtgacctcacagatgagtggagaagcacacacgaggcctatgtcaccgtcctagaaggattcagcgggaacacaacgttgttcagttgctcacacaatttctggctggccatagacatgtcttttgaaccaccagagtttgagattgttggttttaccaaccacattaatgtggtggtgaaatttccatctattgttgaggaagaattacagtttgatttatctctcgtcattgaagaacagtcagagggaattgttaagaagcataaacccgaaataaaaggaaacatgagtggaaatttcacctatatcattgacaagttaattccaaacacgaactactgtgtatctgtttatttagagcacagtgatgagcaagcagtaataaagtctcccttaaaatgcaccctccttccacctggccaggaatcagaatcagcagaatctgccaaataatga

SEQ ID NO: 35 - protein, 429 aa, Artificial
  synthesized inteferon beta chimera
MTNKCLLQIALLLCFSTTALSMSYNLLGFLQRSSNFQCQKLLWQLNGRLEYCLKDRMNFDIPEEIKQLQQFQKEDAALTIYEMLQNIFAIFRQDSSSTGWNETIVENLLANVYHQINHLKTVLEEKLEKEDFTRGKLMSSLHLKRYYGRILHYLKAKEYSHCAWTIVRVEILRNFYFINRLTGYLRNGGGGSGGGGSGGNGTGGGGSGGGGSISYDSPDYTDESCTFKISLRNFRSILSWELKNHSIVPTHYTLLYTIMSKPEDLKVVKNCANTTRSFCDLTDEWRSTHEAYVTVLEGFSGNTTLFSCSHNFWLAIDMSFEPPEFEIVGFTNHINVVVKFPSIVEEELQFDLSLVIEEQSEGIVKKHKPEIKGNMSGNFTYIIDKLIPNTNYCVSVYLEHSDEQAVIKSPLKCTLLPPGQESESAESAK

SEQ ID NO: 36 - DNA, 1293 bp, Artificial
  synthesized interferon beta chimera
atgaccaacaagtgtctcctccaaattgctctcctgttgtgcttctccactacagctctttccatgagctacaacttgcttggattcctacaaagaagcagcaattttcagtgtcagaagctcctgtggcaattgaatgggaggcttgaatactgcctcaaggacaggatgaactttgacatccctgaggagattaagcagctgcagcagttccagaaggaggacgccgcattgaccatctatgagatgctccagaacatctttgctattttcagacaagattcatctagcactggctggaatgagactattgttgagaacctcctggctaatgtctatcatcagataaaccatctgaagacagtcctggaagaaaaactggagaaagaagatttcaccaggggaaaactcatgagcagtctgcacctgaaaagatattatgggaggattctgcattacctgaaggccaaggagtacagtcactgtgcctggaccatagtcagagtggaaatcctaaggaacttttacttcattaacagacttacaggttacctccgaaacggtggcggaggtagtggtggcggaggtagcggttggaatggttctggtggcggaggttccggtggcggaggtagtatttcatatgattcgcctgattacacagatgaatcttgcactttcaagatatcattgcgaaatttccggtccatcttatcatgggaattaaaaaaccactccattgtaccaactcactatacattgctgtatacaatcatgagtaaaccagaagatttgaaggtggttaagaactgtgcaaataccacaagatcattttgtgacctcacagatgagtggagaagcacacacgaggcctatgtcaccgtcctagaaggattcagcgggaacacaacgttgttcagttgctcacacaatttctggctggccatagacatgtcttttgaaccaccagagtttgagattgttggttttaccaaccacattaatgtggtggtgaaatttccatctattgttgaggaagaattacagtttgatttatctctcgtcattgaagaacagtcagagggaattgttaagaagcataaacccgaaataaaaggaaacatgagtggaaatttcacctatatcattgacaagttaattccaaacacgaactactgtgtatctgtttatttagagcacagtgatgagcaagcagtaataaagtctcccttaaaatgcaccctccttccacctggccaggaatcagaatcagcagaatctgccaaataatga

SEQ ID NO: 37 - protein, 429 aa, Artificial
  synthesized interferin beta chimera
MTNKCLLQIALLLCFSTTALSMSYNLLGFLQRSSNFQCQKLLWQLNGRLEYCLKDRMNFDIPEEIKQLQQFQKEDAALTIYEMLQNIFAIFRQDSSSTGWNETIVENLLANVYHQINHLKTVLEEKLEKEDFTRGKLMSSLHLKRYYGRILHYLKAKEYSHCAWTIVRVEILRNFYFINRLTGYLRNGGGGSGGGGSGWNGSGGGGSGGGGSISYDSPDYTDESCTFKISLRNFRSILSWELKNHSIVPTHYTLLYTIMSKPEDLKVVKNCANTTRSFCDLTDEWRSTHEAYVTVLEGFSGNTTLFSCSHNFWLAIDMSFEPPEFEIVGFTNHINVVVKFPSIVEEELQFDLSLVIEEQSEGIVKKHKPEIKGNMSGNFTYIIDKLIPNTNYCVSVYLEHSDEQAVIKSPLKCTLLPPGQESESAESAK

SEQ ID NO: 38 - DNA, 1302 bp, Artificial
  synthesized interferon beta chimera
atgaccaacaagtgtctcctccaaattgctctcctgttgtgcttctccactacagctctttccatgagctacaacttgcttggattcctacaaagaagcagcaattttcagtgtcagaagctcctgtggcaattgaatgggaggcttgaatactgcctcaaggacaggatgaactttgacatccctgaggagattaagcagctgcagcagttccagaaggaggacgccgcattgaccatctatgagatgctccagaacatctttgctattttcagacaagattcatctagcactggctggaatgagactattgttgagaacctcctggctaatgtctatcatcagataaaccatctgaagacagtcctggaagaaaaactggagaaagaagatttcaccaggggaaaactcatgagcagtctgcacctgaaaagatattatgggaggattctgcattacctgaaggccaaggagtacagtcactgtgcctggaccatagtcagagtggaaatcctaaggaacttttacttcattaacagacttacaggttacctccgaaacggtggcggaggtagtggtggcggaggtagcaatgccaccggtggcggaggttctggtggcggaggttccggtggcggaggtagtatttcatatgattcgcctgattacacagatgaatcttgcactttcaagatatcattgcgaaatttccggtccatcttatcatgggaattaaaaaaccactccattgtaccaactcactatacattgctgtatacaatcatgagtaaaccagaagatttgaaggtggttaagaactgtgcaaataccacaagatcattttgtgacctcacagatgagtggagaagcacacacgaggcctatgtcaccgtcctagaaggattcagcgggaacacaacgttgttcagttgctcacacaatttctggctggccatagacatgtcttttgaaccaccagagtttgagattgttggttttaccaaccacattaatgtggtggtgaaatttccatctattgttgaggaagaattacagtttgatttatctctcgtcattgaagaacagtcagagggaattgttaagaagcataaacccgaaataaaaggaaacatgagtggaaatttcacctatatcattgacaagttaattccaaacacgaactactgtgtatctgtttatttagagcacagtgatgagcaagcagtaataaagtctcccttaaaatgcaccctccttccacctggccaggaatcagaatcagcagaatctgccaaataatga

SEQ ID NO: 39 - protein, 432 aa, Artificial [sequence omitted]

SEQ ID NO: 40 - DNA, 1308 bp, Artificial
  synthesized interferon beta chimera
atgcttttgagccagaatgccttcatcttcagatcacttaatttggttctcatggtgtatatcagcctcgtgtttggtatttcatatgattcgcctgattacacagatgaatcttgcactttcaagatatcattgcgaaatttccggtccatcttatcatgggaattaaaaaaccactccattgtaccaactcactatacattgctgtatacaatcatgagtaaaccagaagatttgaaggtggttaagaactgtgcaaataccacaagatcattttgtgacctcacagatgagtggagaagcacacacgaggcctatgtcaccgtcctagaaggattcagcgggaacacaacgttgttcagttgctcacacaatttctggctggccatagacatgtcttttgaaccaccagagtttgagattgttggttttaccaaccacattaatgtggtggtgaaatttccatctattgttgaggaagaattacagtttgatttatctctcgtcattgaagaacagtcagagggaattgttaagaagcataaacccgaaataaaaggaaacatgagtggaaatttcacctatatcattgacaagttaattccaaacacgaactactgtgtatctgtttatttagagcacagtgatgagcaagcagtaataaagtctcccttaaaatgcaccctccttccacctggccaggaatcagaatcagcagaatctgccaaaggtggcggaggtagtggtggcggaggtagcggtggcaatggttctggtggcggaggttccggtggcggaggtagtatgagctacaacttgcttggattcctacaaagaagcagcaattttcagtgtcagaagctcctgtggcaattgaatgggaggcttgaatactgcctcaaggacaggatgaactttgacatccctgaggagattaagcagctgcagcagttccagaaggaggacgccgcattgaccatctatgagatgctccagaacatctttgctattttcagacaagattcatctagcactggctggaatgagactattgttgagaacctcctggctaatgtctatcatcagataaaccatctgaagacagtcctggaagaaaaactggagaaagaagatttcaccaggggaaaactcatgagcagtctgcacctgaaaagatattatgggaggattctgcattacctgaaggccaaggagtacagtcactgtgcctggaccatagtcagagtggaaatcctaaggaacttttacttcattaacagacttacaggttacctccgaaactaatga

SEQ ID NO: 41 - protein, 434 aa, Artificial
  synthesized interferon beta chimera
MLLSQNAFIFRSLNLVLMVYISLVFGISYDSPDYTDESCTFKISLRNFRSILSWELKNHSIVPTHYTLLYTIMSKPEDLKVVKNCANTTRSFCDLTDEWRSTHEAYVTVLEGFSGNTTLFSCSHNFWLAIDMSFEPPEFEIVGFTNHINVVVKFPSIVEEELQFDLSLVIEEQSEGIVKKHKPEIKGNMSGNFTYIIDKLIPNTNYCVSVYLEHSDEQAVIKSPLKCTLLPPGQESESAESAKGGGGSGGGGSGGNGSGGGGSGGGGSMSYNLLGFLQRSSNFQCQKLLWQLNGRLEYCLKDRMNFDIPEEIKQLQQFQKEDAALTIYEMLQNIFAIFRQDSSSTGWNETIVENLLANVYHQINHLKTVLEEKLEKEDFTRGKLMSSLHLKRYYGRILHYLKAKEYSHCAWTIVRVEILRNFYFINRLTGYLRN

SEQ ID NO: 42 - DNA, 231 bp, Artificial
  synthesized somatostatin 14 tandem
atgctgtcctgccgcctccagtgcgcgctggctgcgctgtccatcgtcctggccctgggctgtgtcaccggcgctggctgcaagaatttcttctggaagactttcacatcctgtggtggcggaggtagtggtggcggaggtagcggtggcaatggttctggtggcggaggttccggtggcggaggtagtgctggctgcaagaatttcttctggaagactttcacatcctgt

SEQ ID NO: 43 - protein, 53 aa, Artificial
  synthesized somatostatin 14 tandem
AGCKNFFWKTFTSCGGGGSGGGGSGGNGSGGGGSGGGGSAGCKNFFWKTFTSC

SEQ ID NO: 44 - DNA, 231 bp, Artificial
  synthesized somatostatin 14 tandem
atgctgtcctgccgcctccagtgcgcgctggctgcgctgtccatcgtcctggccctgggctgtgtcaccggcgctggctgcaagaatttcttctggaagactttcacatcctgtggtggcggaggtagtggtggcggaggtagcggtggcaatggtaccggtggcggaggttccggtggcggaggtagtgctggctgcaagaatttcttctggaagactttcacatcctgt

SEQ ID NO: 45 - protein, 53 aa, Artificial
  synthesized somatostatin 14 tandem
AGCKNFFWKTFTSCGGGGSGGGGSGGNGTGGGGSGGGGSAGCKNFFWKTFTSC

SEQ ID NO: 46 - DNA, 231 bp, Artificial
  synthesized somatostatin 14 tandem
atgctgtcctgccgcctccagtgcgcgctggctgcgctgtccatcgtcctggccctgggctgtgtcaccggcgctggctgcaagaatttcttctggaagactttcacatcctgtggtggcggaggtagtggtggcggaggtagcggttggaatggttctggtggcggaggttccggtggcggaggtagtgctggctgcaagaatttcttctggaagactttcacatcctgt

SEQ ID NO: 47 - protein, 53 aa, Artificial
  synthesized somatostatin 14 tandem
AGCKNFFWKTFTSCGGGGSGGGGSGWNGSGGGGSGGGGSAGCKNFFWKTFTSC

SEQ ID NO: 48 - DNA, 240 bp, Artificial
  synthesized somatostatin 14 tandem
atgctgtcctgccgcctccagtgcgcgctggctgcgctgtccatcgtcctggccctgggctgtgtcaccggcgctggctgcaagaatttcttctggaagactttcacatcctgtggtggcggaggtagtggtggcggaggtagcaatgccaccggtggcggaggttctggtggcggaggttccggtggcggaggtagtgctggctgcaagaatttcttctggaagactttcacatcctgt

SEQ ID NO: 49 - protein, 56 aa, Artificial
  synthesized somatostatin 14 tandem
AGCKNFFWKTFTSCGGGGSGGGGSNATGGGGSGGGGSGGGGSAGCKNFFWKTFTSC

SEQ ID NO: 50 - DNA, 231 bp, Artificial
  synthesized somatostatin 14 tandem
atgctgtcctgccgcctccagtgcgcgctggctgcgctgtccatcgtcctggccctgggctgtgtcaccggcgctggctgcaagaatttcttctggaagactttcacatcctgtggtggcggaggtagtggtggcaatggttctggtggcggaggttccggtggcaatggttctggtggcggaggtagtgctggctgcaagaatttcttctggaagactttcacatcctgt

SEQ ID NO: 51 - protein, 53 aa, Artificial
  synthesized somatostatin 14 tandem
AGCKNFFWKTFTSCGGGGSGGNGSGGGGSGGNGSGGGGSAGCKNFFWKTFTSC

SEQ ID NO: 52 - DNA, 315 bp, Artificial
  synthesized somatostatin 28 tandem
atgctgtcctgccgcctccagtgcgcgctggctgcgctgtccatcgtcctggccctgggctgtgtcaccggctctgctaactcaaacccggctatggcaccccgagaacgcaaagctggctgcaagaatttcttctggaagactttcacatcctgtggtggcggaggtagtggtggcggaggtagcggtggcaatggttctggtggcggaggttccggtggcggaggtagttctgctaactcaaacccggctatggcaccccgagaacgcaaagctggctgcaagaatttcttctggaagactttcacatcctgt

SEQ ID NO: 53 - protein, 81 aa, Artificial
  synthesized somatostatin 28 tandem
SANSNPAMAPRERKAGCKNFFWKTFTSCGGGGSGGGGSGGNGSGGGGSGGGGSSANSNPAMAPRERKAGCKNFFWKTFTSC

SEQ ID NO: 54 - DNA, 315 bp, Artificial
  synthesized somatostatin 28 tandem
atgctgtcctgccgcctccagtgcgcgctggctgcgctgtccatcgtcctggccctgggctgtgtcaccggctctgctaactcaaacccggctatggcaccccgagaacgcaaagctggctgcaagaatttcttctggaagactttcacatcctgtggtggcggaggtagtggtggcggaggtagcggtggcaatggtaccggtggcggaggttccggtggcggaggtagttctgctaactcaaacccggctatggcaccccgagaacgcaaagctggctgcaagaatttcttctggaagactttcacatcctgt

SEQ ID NO: 55 - protein, 81 aa, Artificial
  synthesized somatostatin 28 tandem
SANSNPAMAPRERKAGCKNFFWKTFTSCGGGGSGGGGSGGNGTGGGGSGGGGSSANSNPAMAPRERKAGCKNFFWKTFTSC

SEQ ID NO: 56 - DNA, 315 bp, Artificial
  synthesized somatostatin 28 tandem
atgctgtcctgccgcctccagtgcgcgctggctgcgctgtccatcgtcctggccctgggctgtgtcaccggctctgctaactcaaacccggctatggcaccccgagaacgcaaagctggctgcaagaatttcttctggaagactttcacatcctgtggtggcggaggtagtggtggcggaggtagcggttggaatggttctggtggcggaggttccggtggcggaggtagttctgctaactcaaacccggctatggcaccccgagaacgcaaagctggctgcaagaatttcttctggaagactttcacatcctgt

SEQ ID NO: 57 - protein, 81 aa, Artificial
  synthesized somatostatin 28 tandem
SANSNPAMAPRERKAGCKNFFWKTFTSCGGGGSGGGGSGWNGSGGGGSGGGGSSANSNPAMAPRERKAGCKNFFWKTFTSC

SEQ ID NO: 58 - DNA, 324 bp, Artificial
  synthesized somatostatin 28 tandem
atgctgtcctgccgcctccagtgcgcgctggctgcgctgtccatcgtcctggccctgggctgtgtcaccggctctgctaactcaaacccggctatggcaccccgagaacgcaaagctggctgcaagaatttcttctggaagactttcacatcctgtggtggcggaggtagtggtggcggaggtagcaatgccaccggtggcggaggttctggtggcggaggttccggtggcggaggtagttctgctaactcaaacccggctatggcaccccgagaacgcaaagctggctgcaagaatttcttctggaagactttcacatcctgt

SEQ ID NO: 59 - protein, 84 aa, Artificial
  synthesized somatostatin 28 tandem
SANSNPAMAPRERKAGCKNFFWKTFTSCGGGGSGGGGSNATGGGGSGGGGSGGGGSSANSNPAMAPRERKAGCKNFFWKTFTSC

SEQ ID NO: 60 - DNA, 315 bp, Artificial
  synthesized somatostatin 28 tandem
atgctgtcctgccgcctccagtgcgcgctggctgcgctgtccatcgtcctggccctgggctgtgtcaccggctctgctaactcaaacccggctatggcaccccgagaacgcaaagctggctgcaagaatttcttctggaagactttcacatcctgtggtggcggaggtagtggtggcaatggttctggtggcggaggttccggtggcaatggttctggtggcggaggtagttctgctaactcaaacccggctatggcaccccgagaacgcaaagctggctgcaagaatttcttctggaagactttcacatcctgt

SEQ ID NO: 61 - protein, 81 aa, Artificial
  synthesized somatostatin 28 tandem
SANSNPAMAPRERKAGCKNFFWKTFTSCGGGGSGGNGSGGGGSGGNGSGGGGSSANSNPAMAPRERKAGCKNFFWKTFTSC

SEQ ID NO: 62 - DNA, 273 bp, Artificial
  synthesized somatostatin 2814 tandem
atgctgtcctgccgcctccagtgcgcgctggctgcgctgtccatcgtcctggccctgggctgtgtcaccggctctgctaactcaaacccggctatggcaccccgagaacgcaaagctggctgcaagaatttcttctggaagactttcacatcctgtggtggcggaggtagtggtggcggaggtagcggtggcaatggttctggtggcggaggttccggtggcggaggtagtgctggctgcaagaatttcttctggaagactttcacatcctgt

SEQ ID NO: 63 - protein, 67 aa, Artificial
  synthesized somatostatin 14/28 tandem
SANSNPAMAPRERKAGCKNFFWKTFTSCGGGGSGGGGSGGNGSGGGGSGGGGSAGCKNFFWKTFTSC

SEQ ID NO: 64 - DNA, 273 bp, Artificial
  synthesized somatostatin 28/14 tandem
atgctgtcctgccgcctccagtgcgcgctggctgcgctgtccatcgtcctggccctgggctgtgtcaccggcgctggctgcaagaatttcttctggaagactttcacatcctgtggtggcggaggtagtggtggcggaggtagcggtggcaatggttctggtggcggaggttccggtggcggaggtagttctgctaactcaaacccggctatggcaccccgagaacgcaaagctggctgcaagaatttcttctggaagactttcacatcctgt

SEQ ID NO: 65 - protein, 67 aa, Artificial
  synthesized somatostatin 28/14 tandem
AGCKNFFWKTFTSCGGGGSGGGGSGGNGSGGGGSGGGGSSANSNPAMAPRERKAGCKNFFWKTFTSC

SEQ ID NO: 66 - protein, 484 aa, Artificial
  synthesized growth hormone chimera
MATGSRTSLLLAFGLLCLPWLQEGSAFPTIPLSRLFDNAMLRAHRLHQLAFDTYQEFEEAYIPKEQKYSFLQNPQTSLCFSESIPTPSNREETQQKSNLELLRISLLLIQSWLEPVQFLRSVFANSLVYGASDSNVYDLLKDLEEGIQTLMGRLEDGSPRTGQIFKQTYSKFDTNSHNDDALLKNYGLLYCFRKDMDKVETFLRIVQCRSVEGSCGFGGRGGGGSGGGGSGGNGSGGGGSEFFSGSEATAAILSRAPWSLQSVNPGLKTNSSKEPKFTKCRSPERETFSCHWTDEVHHGTKNLGPIQLFYTRRNTQEWTQEWKECPDYVSAGENSCYFNSSFTSIWIPYCIKLTSNGGTVDEKCFSVDEIVQPDPPIALNWTLLNVSLTGIHADIQVRWEAPRNADIQKGWMVLEYELQYKEVNETKWKMMDPILTTSVPVYSLKVDKEYEVRVRSKQRNSGNYGEFSEVLYVTLPQMSQKLFE

SEQ ID NO: 67 - protein, 458 aa, Artificial
  synthesized growth hormone chimera
FPTIPLSRLFDNAMLRAHRLHQLAFDTYQEFEEAYIPKEQKYSFLQNPQTSLCFSESIPTPSNREETQQKSNLELLRISLLLIQSWLEPVQFLRSVFANSLVYGASDSNVYDLLKDLEEGIQTLMGRLEDGSPRTGQIFKQTYSKFDTNSHNDDALLKNYGLLYCFRKDMDKVETFLRIVQCRSVEGSCGFGGRGGGGSGGGGSGGNGSGGGGSEFFSGSEATAAILSRAPWSLQSVNPGLKTNSSKEPKFTKCRSPERETFSCHWTDEVHHGTKNLGPIQLFYTRRNTQEWTQEWKECPDYVSAGENSCYFNSSFTSIWIPYCIKLTSNGGTVDEKCFSVDEIVQPDPPIALNWTLLNVSLTGIHADIQVRWEAPRNADIQKGWMVLEYELQYKEVNETKWKMMDPILTTSVPVYSLKVDKEYEVRVRSKQRNSGNYGEFSEVLYVTLPQMSQKLFE

SEQ ID NO: 68 - protein, 480 aa, Artificial
  synthesized growth hormone chimera
MATGSRTSLLLAFGLLCLPWLQEGSAFPTIPLSRLFDNAMLRAHRLHQLAFDTYQEFEEAYIPKEQKYSFLQNPQTSLCFSESIPTPSNREETQQKSNLELLRISLLLIQSWLEPVQFLRSVFANSLVYGASDSNVYDLLKDLEEGIQTLMGRLEDGSPRTGQIFKQTYSKFDTNSHNDDALLKNYGLLYCFRKDMDKVETFLRIVQCRSVEGSCGFGGRGGGGSGGGGSGGNGSGGGGSEFFSGSEATAAILSRAPWSLQSVNPGLKTNSSKEPKFTKCRSPERETFSCHWTDEVHHGTKNLGPIQLFYTRRNTQEWTQEWKECPDYVSAGENSCYFNSSFTSIWIPYCIKLTSNGGTVDEKCFSVDEIVQPDPPIALNWTLLNVSLTGIHADIQVRWEAPRNADIQKGWMVLEYELQYKEVNETKWKMMDPILTTSVPVYSLKVDKEYEVRVRSKQRNSGNYGEFSEVLYVTLPQMSQ

SEQ ID NO: 69 - protein, 454 aa, Artificial
  synthesized growth hormone chimera
FPTIPLSRLFDNAMLRAHRLHQLAFDTYQEFEEAYIPKEQKYSFLQNPQTSLCFSESIPTPSNREETQQKSNLELLRISLLLIQSWLEPVQFLRSVFANSLVYGASDSNVYDLLKDLEEGIQTLMGRLEDGSPRTGQIFKQTYSKFDTNSHNDDALLKNYGLLYCFRKDMDKVETFLRIVQCRSVEGSCGFGGRGGGGSGGGGSGGNGSGGGGSEFFSGSEATAAILSRAPWSLQSVNPGLKTNSSKEPKFTKCRSPERETFSCHWTDEVHHGTKNLGPIQLFYTRRNTQEWTQEWKECPDYVSAGENSCYFNSSFTSIWIPYCIKLTSNGGTVDEKCFSVDEIVQPDPPIALNWTLLNVSLTGIHADIQVRWEAPRNADIQKGWMVLEYELQYKEVNETKWKMMDPILTTSVPVYSLKVDKEYEVRVRSKQRNSGNYGEFSEVLYVTLPQMSQ

SEQ ID NO: 70 - protein, 480 aa, Artificial
  synthesized growth hormone chimera
MATGSRTSLLLAFGLLCLPWLQEGSAFPTIPLSRLFDNAMLRAHRLHQLAFDTYQEFEEAYIPKEQKYSFLQNPQTSLCFSESIPTPSNREETQQKSNLELLRISLLLIQSWLEPVQFLRSVFANSLVYGASDSNVYDLLKDLEEGIQTLMGRLEDGSPRTGQIFKQTYSKFDTNSHNDDALLKNYGLLYCFRKDMDKVETFLRIVQCRSVEGSCGFGGGGSGGGGSGGNGSGGGGSGGGGSFSGSEATAAILSRAPWSLQSVNPGLKTNSSKEPKFTKCRSPERETFSCHWTDEVHHGTKNLGPIQLFYTRRNTQEWTQEWKECPDYVSAGENSCYFNSSFTSIWIPYCIKLTSNGGTVDEKCFSVDEIVQPDPPIALNWTLLNVSLTGIHADIQVRWEAPRNADIQKGWMVLEYELQYKEVNETKWKMMDPILTTSVPVYSLKVDKEYEVRVRSKQRNSGNYGEFSEVLYVTLPQMSQ

SEQ ID NO: 71 - protein, 454 aa, Artificial
  synthesized growth hormone chimera
FPTIPLSRLFDNAMLRAHRLHQLAFDTYQEFEEAYIPKEQKYSFLQNPQTSLCFSESIPTPSNREETQQKSNLELLRISLLLIQSWLEPVQFLRSVFANSLVYGASDSNVYDLLKDLEEGIQTLMGRLEDGSPRTGQIFKQTYSKFDTNSHNDDALLKNYGLLYCFRKDMDKVETFLRIVQCRSVEGSCGFGGGGSGGGGSGGNGSGGGGSGGGGSFSGSEATAAILSRAPWSLQSVNPGLKTNSSKEPKFTKCRSPERETFSCHWTDEVHHGTKNLGPIQLFYTRRNTQEWTQEWKECPDYVSAGENSCYFNSSFTSIWIPYCIKLTSNGGTVDEKCFSVDEIVQPDPPIALNWTLLNVSLTGIHADIQVRWEAPRNADIQKGWMVLEYELQYKEVNETKWKMMDPILTTSVPVYSLKVDKEYEVRVRSKQRNSGNYGEFSEVLYVTLPQMSQ

SEQ ID NO: 72 - protein, 484 aa, Artificial
  synthesized growth hormone chimera
MATGSRTSLLLAFGLLCLPWLQEGSAFPTIPLSRLFDNAMLRAHRLHQLAFDTYQEFEEAYIPKEQKYSFLQNPQTSLCFSESIPTPSNREETQQKSNLELLRISLLLIQSWLEPVQFLRSVFANSLVYGASDSNVYDLLKDLEEGIQTLMGRLEDGSPRTGQIFKQTYSKFDTNSHNDDALLKNYGLLYCFRKDMDKVETFLRIVQCRSVEGSCGFGGRGGGGSGGGGSGGNGTGGGGSEFFSGSEATAAILSRAPWSLQSVNPGLKTNSSKEPKFTKCRSPERETFSCHWTDEVHHGTKNLGPIQLFYTRRNTQEWTQEWKECPDYVSAGENSCYFNSSFTSIWIPYCIKLTSNGGTVDEKCFSVDEIVQPDPPIALNWTLLNVSLTGIHADIQVRWEAPRNADIQKGWMVLEYELQYKEVNETKWKMMDPILTTSVPVYSLKVDKEYEVRVRSKQRNSGNYGEFSEVLYVTLPQMSQKLFE

SEQ ID NO: 73 - protein, 458 aa, Artificial
  synthesized growth hormone chimera
FPTIPLSRLFDNAMLRAHRLHQLAFDTYQEFEEAYIPKEQKYSFLQNPQTSLCFSESIPTPSNREETQQKSNLELLRISLLLIQSWLEPVQFLRSVFANSLVYGASDSNVYDLLKDLEEGIQTLMGRLEDGSPRTGQIFKQTYSKFDTNSHNDDALLKNYGLLYCFRKDMDKVETFLRIVQCRSVEGSCGFGGRGGGGSGGGGSGGNGTGGGGSEFFSGSEATAAILSRAPWSLQSVNPGLKTNSSKEPKFTKCRSPERETFSCHWTDEVHHGTKNLGPIQLFYTRRNTQEWTQEWKECPDYVSAGENSCYFNSSFTSIWIPYCIKLTSNGGTVDEKCFSVDEIVQPDPPIALNWTLLNVSLTGIHADIQVRWEAPRNADIQKGWMVLEYELQYKEVNETKWKMMDPILTTSVPVYSLKVDKEYEVRVRSKQRNSGNYGEFSEVLYVTLPQMSQKLFE

SEQ ID NO: 74 - protein, 480 aa, Artificial
  synthesized growth hormone chimera
MATGSRTSLLLAFGLLCLPWLQEGSAFPTIPLSRLFDNAMLRAHRLHQLAFDTYQEFEEAYIPKEQKYSFLQNPQTSLCFSESIPTPSNREETQQKSNLELLRISLLLIQSWLEPVQFLRSVFANSLVYGASDSNVYDLLKDLEEGIQTLMGRLEDGSPRTGQIFKQTYSKFDTNSHNDDALLKNYGLLYCFRKDMDKVETFLRIVQCRSVEGSCGFGGRGGGGSGGGGSGGNGTGGGGSEFFSGSEATAAILSRAPWSLQSVNPGLKTNSSKEPKFTKCRSPERETFSCHWTDEVHHGTKNLGPIQLFYTRRNTQEWTQEWKECPDYVSAGENSCYFNSSFTSIWIPYCIKLTSNGGTVDEKCFSVDEIVQPDPPIALNWTLLNVSLTGIHADIQVRWEAPRNADIQKGWMVLEYELQYKEVNETKWKMMDPILTTSVPVYSLKVDKEYEVRVRSKQRNSGNYGEFSEVLYVTLPQMSQ

SEQ ID NO: 75 - protein, 454 aa, Artificial
  synthesized growth hormone chimera
FPTIPLSRLFDNAMLRAHRLHQLAFDTYQEFEEAYIPKEQKYSFLQNPQTSLCFSESIPTPSNREETQQKSNLELLRISLLLIQSWLEPVQFLRSVFANSLVYGASDSNVYDLLKDLEEGIQTLMGRLEDGSPRTGQIFKQTYSKFDTNSHNDDALLKNYGLLYCFRKDMDKVETFLRIVQCRSVEGSCGFGGRGGGGSGGGGSGGNGTGGGGSEFFSGSEATAAILSRAPWSLQSVNPGLKTNSSKEPKFTKCRSPERETFSCHWTDEVHHGTKNLGPIQLFYTRRNTQEWTQEWKECPDYVSAGENSCYFNSSFTSIWIPYCIKLTSNGGTVDEKCFSVDEIVQPDPPIALNWTLLNVSLTGIHADIQVRWEAPRNADIQKGWMVLEYELQYKEVNETKWKMMDPILTTSVPVYSLKVDKEYEVRVRSKQRNSGNYGEFSEVLYVTLPQMSQ

SEQ ID NO: 76 - protein, 480 aa, Artificial
  synthesized growth hormone chimera
MATGSRTSLLLAFGLLCLPWLQEGSAFPTIPLSRLFDNAMLRAHRLHQLAFDTYQEFEEAYIPKEQKYSFLQNPQTSLCFSESIPTPSNREETQQKSNLELLRISLLLIQSWLEPVQFLRSVFANSLVYGASDSNVYDLLKDLEEGIQTLMGRLEDGSPRTGQIFKQTYSKFDTNSHNDDALLKNYGLLYCFRKDMDKVETFLRIVQCRSVEGSCGFGGGGSGGGGSGGNGTGGGGSGGGGSFSGSEATAAILSRAPWSLQSVNPGLKTNSSKEPKFTKCRSPERETFSCHWTDEVHHGTKNLGPIQLFYTRRNTQEWTQEWKECPDYVSAGENSCYFNSSFTSIWIPYCIKLTSNGGTVDEKCFSVDEIVQPDPPIALNWTLLNVSLTGIHADIQVRWEAPRNADIQKGWMVLEYELQYKEVNETKWKMMDPILTTSVPVYSLKVDKEYEVRVRSKQRNSGNYGEFSEVLYVTLPQMSQ

SEQ ID NO: 77 - protein, 454 aa, Artificial
  synthesized growth hormone chimera
FPTIPLSRLFDNAMLRAHRLHQLAFDTYQEFEEAYIPKEQKYSFLQNPQTSLCFSESIPTPSNREETQQKSNLELLRISLLLIQSWLEPVQFLRSVFANSLVYGASDSNVYDLLKDLEEGIQTLMGRLEDGSPRTGQIFKQTYSKFDTNSHNDDALLKNYGLLYCFRKDMDKVETFLRIVQCRSVEGSCGFGGGGSGGGGSGGNGTGGGGSGGGGSFSGSEATAAILSRAPWSLQSVNPGLKTNSSKEPKFTKCRSPERETFSCHWTDEVHHGTKNLGPIQLFYTRRNTQEWTQEWKECPDYVSAGENSCYFNSSFTSIWIPYCIKLTSNGGTVDEKCFSVDEIVQPDPPIALNWTLLNVSLTGIHADIQVRWEAPRNADIQKGWMVLEYELQYKEVNETKWKMMDPILTTSVPVYSLKVDKEYEVRVRSKQRNSGNYGEFSEVLYVTLPQMSQ

SEQ ID NO: 78 - protein, 484 aa, Artificial
  synthesized growth hormone chimera
MATGSRTSLLLAFGLLCLPWLQEGSAFPTIPLSRLFDNAMLRAHRLHQLAFDTYQEFEEAYIPKEQKYSFLQNPQTSLCFSESIPTPSNREETQQKSNLELLRISLLLIQSWLEPVQFLRSVFANSLVYGASDSNVYDLLKDLEEGIQTLMGRLEDGSPRTGQIFKQTYSKFDTNSHNDDALLKNYGLLYCFRKDMDKVETFLRIVQCRSVEGSCGFGGRGGGGSGGGGSGWNGSGGGGSEFFSGSEATAAILSRAPWSLQSVNPGLKTNSSKEPKFTKCRSPERETFSCHWTDEVHHGTKNLGPIQLFYTRRNTQEWTQEWKECPDYVSAGENSCYFNSSFTSIWIPYCIKLTSNGGTVDEKCFSVDEIVQPDPPIALNWTLLNVSLTGIHADIQVRWEAPRNADIQKGWMVLEYELQYKEVNETKWKMMDPILTTSVPVYSLKVDKEYEVRVRSKQRNSGNYGEFSEVLYVTLPQMSQKLFE

SEQ ID NO: 79 - protein, 458 aa, Artificial
  synthesized growth hormone chimera
FPTIPLSRLFDNAMLRAHRLHQLAFDTYQEFEEAYIPKEQKYSFLQNPQTSLCFSESIPTPSNREETQQKSNLELLRISLLLIQSWLEPVQFLRSVFANSLVYGASDSNVYDLLKDLEEGIQTLMGRLEDGSPRTGQIFKQTYSKFDTNSHNDDALLKNYGLLYCFRKDMDKVETFLRIVQCRSVEGSCGFGGRGGGGSGGGGSGWNGSGGGGSEFFSGSEATAAILSRAPWSLQSVNPGLKTNSSKEPKFTKCRSPERETFSCHWTDEVHHGTKNLGPIQLFYTRRNTQEWTQEWKECPDYVSAGENSCYFNSSFTSIWIPYCIKLTSNGGTVDEKCFSVDEIVQPDPPIALNWTLLNVSLTGIHADIQVRWEAPRNADIQKGWMVLEYELQYKEVNETKWKMMDPILTTSVPVYSLKVDKEYEVRVRSKQRNSGNYGEFSEVLYVTLPQMSQKLFE

SEQ ID NO: 80 - protein, 480 aa, Artificial
  synthesized growth hormone chimera
MATGSRTSLLLAFGLLCLPWLQEGSAFPTIPLSRLFDNAMLRAHRLHQLAFDTYQEFEEAYIPKEQKYSFLQNPQTSLCFSESIPTPSNREETQQKSNLELLRISLLLIQSWLEPVQFLRSVFANSLVYGASDSNVYDLLKDLEEGIQTLMGRLEDGSPRTGQIFKQTYSKFDTNSHNDDALLKNYGLLYCFRKDMDKVETFLRIVQCRSVEGSCGFGGRGGGGSGGGGSGWNGSGGGGSEFFSGSEATAAILSRAPWSLQSVNPGLKTNSSKEPKFTKCRSPERETFSCHWTDEVHHGTKNLGPIQLFYTRRNTQEWTQEWKECPDYVSAGENSCYFNSSFTSIWIPYCIKLTSNGGTVDEKCFSVDEIVQPDPPIALNWTLLNVSLTGIHADIQVRWEAPRNADIQKGWMVLEYELQYKEVNETKWKMMDPILTTSVPVYSLKVDKEYEVRVRSKQRNSGNYGEFSEVLYVTLPQMSQ

SEQ ID NO: 81 - protein, 454 aa, Artificial
  synthesized growth hormone chimera
FPTIPLSRLFDNAMLRAHRLHQLAFDTYQEFEEAYIPKEQKYSFLQNPQTSLCFSESIPTPSNREETQQKSNLELLRISLLLIQSWLEPVQFLRSVFANSLVYGASDSNVYDLLKDLEEGIQTLMGRLEDGSPRTGQIFKQTYSKFDTNSHNDDALLKNYGLLYCFRKDMDKVETFLRIVQCRSVEGSCGFGGRGGGGSGGGGSGWNGSGGGGSEFFSGSEATAAILSRAPWSLQSVNPGLKTNSSKEPKFTKCRSPERETFSCHWTDEVHHGTKNLGPIQLFYTRRNTQEWTQEWKECPDYVSAGENSCYFNSSFTSIWIPYCIKLTSNGGTVDEKCFSVDEIVQPDPPIALNWTLLNVSLTGIHADIQVRWEAPRNADIQKGWMVLEYELQYKEVNETKWKMMDPILTTSVPVYSLKVDKEYEVRVRSKQRNSGNYGEFSEVLYVTLPQMSQ

SEQ ID NO: 82 - protein, 480 aa, Artificial
  synthesized growth hormone chimera
MATGSRTSLLLAFGLLCLPWLQEGSAFPTIPLSRLFDNAMLRAHRLHQLAFDTYQEFEEAYIPKEQKYSFLQNPQTSLCFSESIPTPSNREETQQKSNLELLRISLLLIQSWLEPVQFLRSVFANSLVYGASDSNVYDLLKDLEEGIQTLMGRLEDGSPRTGQIFKQTYSKFDTNSHNDDALLKNYGLLYCFRKDMDKVETFLRIVQCRSVEGSCGFGGGGSGGGGSGWNGSGGGGSGGGGSFSGSEATAAILSRAPWSLQSVNPGLKTNSSKEPKFTKCRSPERETFSCHWTDEVHHGTKNLGPIQLFYTRRNTQEWTQEWKECPDYVSAGENSCYFNSSFTSIWIPYCIKLTSNGGTVDEKCFSVDEIVQPDPPIALNWTLLNVSLTGIHADIQVRWEAPRNADIQKGWMVLEYELQYKEVNETKWKMMDPILTTSVPVYSLKVDKEYEVRVRSKQRNSGNYGEFSEVLYVTLPQMSQ

SEQ ID NO: 83 - protein, 454 aa, Artificial
  synthesized growth hormone chimera
FPTIPLSRLFDNAMLRAHRLHQLAFDTYQEFEEAYIPKEQKYSFLQNPQTSLCFSESIPTPSNREETQQKSNLELLRISLLLIQSWLEPVQFLRSVFANSLVYGASDSNVYDLLKDLEEGIQTLMGRLEDGSPRTGQIFKQTYSKFDTNSHNDDALLKNYGLLYCFRKDMDKVETFLRIVQCRSVEGSCGFGGGGSGGGGSGWNGSGGGGSGGGGSFSGSEATAAILSRAPWSLQSVNPGLKTNSSKEPKFTKCRSPERETFSCHWTDEVHHGTKNLGPIQLFYTRRNTQEWTQEWKECPDYVSAGENSCYFNSSFTSIWIPYCIKLTSNGGTVDEKCFSVDEIVQPDPPIALNWTLLNVSLTGIHADIQVRWEAPRNADIQKGWMVLEYELQYKEVNETKWKMMDPILTTSVPVYSLKVDKEYEVRVRSKQRNSGNYGEFSEVLYVTLPQMSQ

SEQ ID NO: 84 - protein, 487 aa, Artificial
  synthesized growth hormone chimera
MATGSRTSLLLAFGLLCLPWLQEGSAFPTIPLSRLFDNAMLRAHRLHQLAFDTYQEFEEAYIPKEQKYSFLQNPQTSLCFSESIPTPSNREETQQKSNLELLRISLLLIQSWLEPVQFLRSVFANSLVYGASDSNVYDLLKDLEEGIQTLMGRLEDGSPRTGQIFKQTYSKFDTNSHNDDALLKNYGLLYCFRKDMDKVETFLRIVQCRSVEGSCGFGGRGGGGSGGGGSGGGGSNATGGGGSEFFSGSEATAAILSRAPWSLQSVNPGLKTNSSKEPKFTKCRSPERETFSCHWTDEVHHGTKNLGPIQLFYTRRNTQEWTQEWKECPDYVSAGENSCYFNSSFTSIWIPYCIKLTSNGGTVDEKCFSVDEIVQPDPPIALNWTLLNVSLTGIHADIQVRWEAPRNADIQKGWMVLEYELQYKEVNETKWKMMDPILTTSVPVYSLKVDKEYEVRVRSKQRNSGNYGEFSEVLYVTLPQMSQKLFE

SEQ ID NO: 85 - protein, 461 aa, Artificial
  synthesized growth hormone chimera
FPTIPLSRLFDNAMLRAHRLHQLAFDTYQEFEEAYIPKEQKYSFLQNPQTSLCFSESIPTPSNREETQQKSNLELLRISLLLIQSWLEPVQFLRSVFANSLVYGASDSNVYDLLKDLEEGIQTLMGRLEDGSPRTGQIFKQTYSKFDTNSHNDDALLKNYGLLYCFRKDMDKVETFLRIVQCRSVEGSCGFGGRGGGGSGGGGSGGGGSNATGGGGSEFFSGSEATAAILSRAPWSLQSVNPGLKTNSSKEPKFTKCRSPERETFSCHWTDEVHHGTKNLGPIQLFYTRRNTQEWTQEWKECPDYVSAGENSCYFNSSFTSIWIPYCIKLTSNGGTVDEKCFSVDEIVQPDPPIALNWTLLNVSLTGIHADIQVRWEAPRNADIQKGWMVLEYELQYKEVNETKWKMMDPILTTSVPVYSLKVDKEYEVRVRSKQRNSGNYGEFSEVLYVTLPQMSQKLFE

SEQ ID NO: 86 - protein, 483 aa, Artificial
  synthesized growth hormone chimera
MATGSRTSLLLAFGLLCLPWLQEGSAFPTIPLSRLFDNAMLRAHRLHQLAFDTYQEFEEAYIPKEQKYSFLQNPQTSLCFSESIPTPSNREETQQKSNLELLRISLLLIQSWLEPVQFLRSVFANSLVYGASDSNVYDLLKDLEEGIQTLMGRLEDGSPRTGQIFKQTYSKFDTNSHNDDALLKNYGLLYCFRKDMDKVETFLRIVQCRSVEGSCGFGGRGGGGSGGGGSGGGGSNATGGGGSEFFSGSEATAAILSRAPWSLQSVNPGLKTNSSKEPKFTKCRSPERETFSCHWTDEVHHGTKNLGPIQLFYTRRNTQEWTQEWKECPDYVSAGENSCYFNSSFTSIWIPYCIKLTSNGGTVDEKCFSVDEIVQPDPPIALNWTLLNVSLTGIHADIQVRWEAPRNADIQKGWMVLEYELQYKEVNETKWKMMDPILTTSVPVYSLKVDKEYEVRVRSKQRNSGNYGEFSEVLYVTLPQMSQ

SEQ ID NO: 87 - protein, 457 aa, Artificial
  synthesized growth hormone chimera
FPTIPLSRLFDNAMLRAHRLHQLAFDTYQEFEEAYIPKEQKYSFLQNPQTSLCFSESIPTPSNREETQQKSNLELLRISLLLIQSWLEPVQFLRSVFANSLVYGASDSNVYDLLKDLEEGIQTLMGRLEDGSPRTGQIFKQTYSKFDTNSHNDDALLKNYGLLYCFRKDMDKVETFLRIVQCRSVEGSCGFGGRGGGGSGGGGSGGGGSNATGGGGSEFFSGSEATAAILSRAPWSLQSVNPGLKTNSSKEPKFTKCRSPERETFSCHWTDEVHHGTKNLGPIQLFYTRRNTQEWTQEWKECPDYVSAGENSCYFNSSFTSIWIPYCIKLTSNGGTVDEKCFSVDEIVQPDPPIALNWTLLNVSLTGIHADIQVRWEAPRNADIQKGWMVLEYELQYKEVNETKWKMMDPILTTSVPVYSLKVDKEYEVRVRSKQRNSGNYGEFSEVLYVTLPQMSQ

SEQ ID NO: 88 - protein, 483 aa, Artificial
  synthesized growth hormone chimera
MATGSRTSLLLAFGLLCLPWLQEGSAFPTIPLSRLFDNAMLRAHRLHQLAFDTYQEFEEAYIPKEQKYSFLQNPQTSLCFSESIPTPSNREETQQKSNLELLRISLLLIQSWLEPVQFLRSVFANSLVYGASDSNVYDLLKDLEEGIQTLMGRLEDGSPRTGQIFKQTYSKFDTNSHNDDALLKNYGLLYCFRKDMDKVETFLRIVQCRSVEGSCGFGGGGSGGGGSGGGGSNATGGGGSGGGGSFSGSEATAAILSRAPWSLQSVNPGLKTNSSKEPKFTKCRSPERETFSCHWTDEVHHGTKNLGPIQLFYTRRNTQEWTQEWKECPDYVSAGENSCYFNSSFTSIWIPYCIKLTSNGGTVDEKCFSVDEIVQPDPPIALNWTLLNVSLTGIHADIQVRWEAPRNADIQKGWMVLEYELQYKEVNETKWKMMDPILTTSVPVYSLKVDKEYEVRVRSKQRNSGNYGEFSEVLYVTLPQMSQ

SEQ ID NO: 89 - protein, 457 aa, Artificial
  synthesized growth hormone chimera
FPTIPLSRLFDNAMLRAHRLHQLAFDTYQEFEEAYIPKEQKYSFLQNPQTSLCFSESIPTPSNREETQQKSNLELLRISLLLIQSWLEPVQFLRSVFANSLVYGASDSNVYDLLKDLEEGIQTLMGRLEDGSPRTGQIFKQTYSKFDTNSHNDDALLKNYGLLYCFRKDMDKVETFLRIVQCRSVEGSCGFGGGGSGGGGSGGGGSNATGGGGSGGGGSFSGSEATAAILSRAPWSLQSVNPGLKTNSSKEPKFTKCRSPERETFSCHWTDEVHHGTKNLGPIQLFYTRRNTQEWTQEWKECPDYVSAGENSCYFNSSFTSIWIPYCIKLTSNGGTVDEKCFSVDEIVQPDPPIALNWTLLNVSLTGIHADIQVRWEAPRNADIQKGWMVLEYELQYKEVNETKWKMMDPILTTSVPVYSLKVDKEYEVRVRSKQRNSGNYGEFSEVLYVTLPQMSQ

SEQ ID NO: 90 - protein, 484 aa, Artificial
  synthesized growth hormone chimera
MATGSRTSLLLAFGLLCLPWLQEGSAFPTIPLSRLFDNAMLRAHRLHQLAFDTYQEFEEAYIPKEQKYSFLQNPQTSLCFSESIPTPSNREETQQKSNLELLRISLLLIQSWLEPVQFLRSVFANSLVYGASDSNVYDLLKDLEERIQTLMGRLEDGSPRTGQIFKQTYSKFDTNSHNDDALLKNYGLLYCFRKDMDKVETFLRIVQCRSVEGSCGFGGRGGGGSGGGGSGGNGSGGGGSEFFSGSEATAAILSRAPWSLQSVNPGLKTNSSKEPKFTKCRSPERETFSCHWTDEVHHGTKNLGPIQLFYTRRNTQEWTQEWKECPDYVSAGENSCYFNSSFTSIWIPYCIKLTSNGGTVDEKCFSVDEIVQPDPPIALNWTLLNVSLTGIHADIQVRWEAPRNADIQKGWMVLEYELQYKEVNETKWKMMDPILTTSVPVYSLKVDKEYEVRVRSKQRNSGNYGEFSEVLYVTLPQMSQKLFE

SEQ ID NO: 91 - protein, 480 aa, Artificial
  synthesized growth hormone chimera
MATGSRTSLLLAFGLLCLPWLQEGSAFPTIPLSRLFDNAMLRAHRLHQLAFDTYQEFEEAYIPKEQKYSFLQNPQTSLCFSESIPTPSNREETQQKSNLELLRISLLLIQSWLEPVQFLRSVFANSLVYGASDSNVYDLLKDLEERIQTLMGRLEDGSPRTGQIFKQTYSKFDTNSHNDDALLKNYGLLYCFRKDMDKVETFLRIVQCRSVEGSCGFGGRGGGGSGGGGSGGNGSGGGGSEFFSGSEATAAILSRAPWSLQSVNPGLKTNSSKEPKFTKCRSPERETFSCHWTDEVHHGTKNLGPIQLFYTRRNTQEWTQEWKECPDYVSAGENSCYFNSSFTSIWIPYCIKLTSNGGTVDEKCFSVDEIVQPDPPIALNWTLLNVSLTGIHADIQVRWEAPRNADIQKGWMVLEYELQYKEVNETKWKMMDPILTTSVPVYSLKVDKEYEVRVRSKQRNSGNYGEFSEVLYVTLPQMSQ

SEQ ID NO: 92 - protein, 480 aa, Artificial
  synthesized growth hormone chimera
MATGSRTSLLLAFGLLCLPWLQEGSAFPTIPLSRLFDNAMLRAHRLHQLAFDTYQEFEEAYIPKEQKYSFLQNPQTSLCFSESIPTPSNREETQQKSNLELLRISLLLIQSWLEPVQFLRSVFANSLVYGASDSNVYDLLKDLEERIQTLMGRLEDGSPRTGQIFKQTYSKFDTNSHNDDALLKNYGLLYCFRKDMDKVETFLRIVQCRSVEGSCGFGGGGSGGGGSGGNGSGGGGSGGGGSFSGSEATAAILSRAPWSLQSVNPGLKTNSSKEPKFTKCRSPERETFSCHWTDEVHHGTKNLGPIQLFYTRRNTQEWTQEWKECPDYVSAGENSCYFNSSFTSIWIPYCIKLTSNGGTVDEKCFSVDEIVQPDPPIALNWTLLNVSLTGIHADIQVRWEAPRNADIQKGWMVLEYELQYKEVNETKWKMMDPILTTSVPVYSLKVDKEYEVRVRSKQRNSGNYGEFSEVLYVTLPQMSQ

SEQ ID NO: 93 - protein, 455 aa, Artificial
  synthesized growth hormone chimera
MATGSRTSLLLAFGLLCLPWLQEGSAFPTIPLSRLFDNAMLRAHRLHQLAFDTYQEFEEAYIPKEQKYSFLQNPQTSLCFSESIPTPSNREETQQKSNLELLRISLLLIQSWLEPVQFLRSVFANSLVYGASDSNVYDLLKDLEERIQTLMGRLEDGSPRTGQIFKQTYSKFDTNSHNDDALLKNYGLLYCFRKDMDKVETFLRIVQCRSVEGSCGFFSGSEATAAILSRAPWSLQSVNPGLKTNSSKEPKFTKCRSPERETFSCHWTDEVHHGTKNLGPIQLFYTRRNTQEWTQEWKECPDYVSAGENSCYFNSSFTSIWIPYCIKLTSNGGTVDEKCFSVDEIVQPDPPIALNWTLLNVSLTGIHADIQVRWEAPRNADIQKGWMVLEYELQYKEVNETKWKMMDPILTTSVPVYSLKVDKEYEVRVRSKQRNSGNYGEFSEVLYVTLPQMSQ

SEQ ID NO: 94 - protein, 484 aa, Artificial
  synthesized growth hormone chimera
MATGSRTSLLLAFGLLCLPWLQEGSAFPTIPLSRLFDNAMLRADRLNQLAFDTYQEFEEAYIPKEQKYSFLQNPQTSLCFSESIPTPSNREETQQKSNLELLRISLLLIQSWLEPVQFLRSVFANSLVYGASDSNVYDLLKDLEERIQTLMGRLEDGSPRTGQIFKQTYSKFDTNSHNDDALLKNYGLLYCFNADMSRVSTFLRTVQCRSVEGSCGFGGRGGGGSGGGGSGGNGSGGGGSEFFSGSEATAAILSRAPWSLQSVNPGLKTNSSKEPKFTKCRSPERETFSCHWTDEVHHGTKNLGPIQLFYTRRNTQEWTQEWKECPDYVSAGENSCYFNSSFTSIWIPYCIKLTSNGGTVDEKCFSVDEIVQPDPPIALNWTLLNVSLTGIHADIQVRWEAPRNADIQKGWMVLEYELQYKEVNETKWKMMDPILTTSVPVYSLKVDKEYEVRVRSKQRNSGNYGEFSEVLYVTLPQMSQKLFE

SEQ ID NO: 95 - protein, 480 aa, Artificial
  synthesized growth hormone chimera
MATGSRTSLLLAFGLLCLPWLQEGSAFPTIPLSRLFDNAMLRADRLNQLAFDTYQEFEEAYIPKEQKYSFLQNPQTSLCFSESIPTPSNREETQQKSNLELLRISLLLIQSWLEPVQFLRSVFANSLVYGASDSNVYDLLKDLEERIQTLMGRLEDGSPRTGQIFKQTYSKFDTNSHNDDALLKNYGLLYCFNADMSRVSTFLRTVQCRSVEGSCGFGGRGGGGSGGGGSGGNGSGGGGSEFFSGSEATAAILSRAPWSLQSVNPGLKTNSSKEPKFTKCRSPERETFSCHWTDEVHHGTKNLGPIQLFYTRRNTQEWTQEWKECPDYVSAGENSCYFNSSFTSIWIPYCIKLTSNGGTVDEKCFSVDEIVQPDPPIALNWTLLNVSLTGIHADIQVRWEAPRNADIQKGWMVLEYELQYKEVNETKWKMMDPILTTSVPVYSLKVDKEYEVRVRSKQRNSGNYGEFSEVLYVTLPQMSQ

SEQ ID NO: 96 - protein, 480 aa, Artificial
  synthesized growth hormone chimera
MATGSRTSLLLAFGLLCLPWLQEGSAFPTIPLSRLFDNAMLRADRLNQLAFDTYQEFEEAYIPKEQKYSFLQNPQTSLCFSESIPTPSNREETQQKSNLELLRISLLLIQSWLEPVQFLRSVFANSLVYGASDSNVYDLLKDLEERIQTLMGRLEDGSPRTGQIFKQTYSKFDTNSHNDDALLKNYGLLYCFNADMSRVSTFLRTVQCRSVEGSCGFGGGGSGGGGSGGNGSGGGGSGGGGSFSGSEATAAILSRAPWSLQSVNPGLKTNSSKEPKFTKCRSPERETFSCHWTDEVHHGTKNLGPIQLFYTRRNTQEWTQEWKECPDYVSAGENSCYFNSSFTSIWIPYCIKLTSNGGTVDEKCFSVDEIVQPDPPIALNWTLLNVSLTGIHADIQVRWEAPRNADIQKGWMVLEYELQYKEVNETKWKMMDPILTTSVPVYSLKVDKEYEVRVRSKQRNSGNYGEFSEVLYVTLPQMSQ

SEQ ID NO: 97 - protein, 455 aa, Artificial
  synthesized growth hormone chimera
MATGSRTSLLLAFGLLCLPWLQEGSAFPTIPLSRLFDNAMLRADRLNQLAFDTYQEFEEAYIPKEQKYSFLQNPQTSLCFSESIPTPSNREETQQKSNLELLRISLLLIQSWLEPVQFLRSVFANSLVYGASDSNVYDLLKDLEERIQTLMGRLEDGSPRTGQIFKQTYSKFDTNSHNDDALLKNYGLLYCFNADMSRVSTFLRTVQCRSVEGSCGFFSGSEATAAILSRAPWSLQSVNPGLKTNSSKEPKFTKCRSPERETFSCHWTDEVHHGTKNLGPIQLFYTRRNTQEWTQEWKECPDYVSAGENSCYFNSSFTSIWIPYCIKLTSNGGTVDEKCFSVDEIVQPDPPIALNWTLLNVSLTGIHADIQVRWEAPRNADIQKGWMVLEYELQYKEVNETKWKMMDPILTTSVPVYSLKVDKEYEVRVRSKQRNSGNYGEFSEVLYVTLPQMSQ

SEQ ID NO: 98 - protein, 484 aa, Artificial
  synthesized growth hormone chimera
MATGSRTSLLLAFGLLCLPWLQEGSAFPTIPLSRLFDNAMLRAHRLHQLAFDTYQEFEEAYIPKEQKYSFLQNPQTSLCFSESIPTPSNREETQQKSNLELLRISLLLIQSWLEPVQFLRSVFANSLVYGASDSNVYDLLKDLEERIQTLMGRLEDGSPRTGQIFKQTYSKFDTNSHNDDALLKNYGLLYCFRKDMDKVETFLRIVQCRSVEGSCGFGGRGGGGSGGGGSGGNGTGGGGSEFFSGSEATAAILSRAPWSLQSVNPGLKTNSSKEPKFTKCRSPERETFSCHWTDEVHHGTKNLGPIQLFYTRRNTQEWTQEWKECPDYVSAGENSCYFNSSFTSIWIPYCIKLTSNGGTVDEKCFSVDEIVQPDPPIALNWTLLNVSLTGIHADIQVRWEAPRNADIQKGWMVLEYELQYKEVNETKWKMMDPILTTSVPVYSLKVDKEYEVRVRSKQRNSGNYGEFSEVLYVTLPQMSQKLFE

SEQ ID NO: 99 - protein, 480 aa, Artificial
  synthesized growth hormone chimera
MATGSRTSLLLAFGLLCLPWLQEGSAFPTIPLSRLFDNAMLRAHRLHQLAFDTYQEFEEAYIPKEQKYSFLQNPQTSLCFSESIPTPSNREETQQKSNLELLRISLLLIQSWLEPVQFLRSVFANSLVYGASDSNVYDLLKDLEERIQTLMGRLEDGSPRTGQIFKQTYSKFDTNSHNDDALLKNYGLLYCFRKDMDKVETFLRIVQCRSVEGSCGFGGRGGGGSGGGGSGGNGTGGGGSEFFSGSEATAAILSRAPWSLQSVNPGLKTNSSKEPKFTKCRSPERETFSCHWTDEVHHGTKNLGPIQLFYTRRNTQEWTQEWKECPDYVSAGENSCYFNSSFTSIWIPYCIKLTSNGGTVDEKCFSVDEIVQPDPPIALNWTLLNVSLTGIHADIQVRWEAPRNADIQKGWMVLEYELQYKEVNETKWKMMDPILTTSVPVYSLKVDKEYEVRVRSKQRNSGNYGEFSEVLYVTLPQMSQ

SEQ ID NO: 100 - protein, 480 aa, Artificial
  synthesized growth horrmone chimera
MATGSRTSLLLAFGLLCLPWLQEGSAFPTIPLSRLFDNAMLRAHRLHQLAFDTYQEFEEAYIPKEQKYSFLQNPQTSLCFSESIPTPSNREETQQKSNLELLRISLLLIQSWLEPVQFLRSVFANSLVYGASDSNVYDLLKDLEERIQTLMGRLEDGSPRTGQIFKQTYSKFDTNSHNDDALLKNYGLLYCFRKDMDKVETFLRIVQCRSVEGSCGFGGGGSGGGGSGGNGTGGGGSGGGGSFSGSEATAAILSRAPWSLQSVNPGLKTNSSKEPKFTKCRSPERETFSCHWTDEVHHGTKNLGPIQLFYTRRNTQEWTQEWKECPDYVSAGENSCYFNSSFTSIWIPYCIKLTSNGGTVDEKCFSVDEIVQPDPPIALNWTLLNVSLTGIHADIQVRWEAPRNADIQKGWMVLEYELQYKEVNETKWKMMDPILTTSVPVYSLKVDKEYEVRVRSKQRNSGNYGEFSEVLYVTLPQMSQ

SEQ ID NO: 101 - protein, 455 aa, Artificial; identical to SEQ ID NO: 93
  synthesized growth hormone chimera

SEQ ID NO: 102 - protein, 484 aa, Artificial
  synthesized growth hormone chimera
MATGSRTSLLLAFGLLCLPWLQEGSAFPTIPLSRLFDNAMLRADRLNQLAFDTYQEFEEAYIPKEQKYSFLQNPQTSLCFSESIPTPSNREETQQKSNLELLRISLLLIQSWLEPVQFLRSVFANSLVYGASDSNVYDLLKDLEERIQTLMGRLEDGSPRTGQIFKQTYSKFDTNSHNDDALLKNYGLLYCFNADMSRVSTFLRTVQCRSVEGSCGFGGRGGGGSGGGGSGGNGTGGGGSEFFSGSEATAAILSRAPWSLQSVNPGLKTNSSKEPKFTKCRSPERETFSCHWTDEVHHGTKNLGPIQLFYTRRNTQEWTQEWKECPDYVSAGENSCYFNSSFTSIWIPYCIKLTSNGGTVDEKCFSVDEIVQPDPPIALNWTLLNVSLTGIHADIQVRWEAPRNADIQKGWMVLEYELQYKEVNETKWKMMDPILTTSVPVYSLKVDKEYEVRVRSKQRNSGNYGEFSEVLYVTLPQMSQKLFE

SEQ ID NO: 103 - protein, 480 aa, Artificial
  synthesized growth hormone chimera
MATGSRTSLLLAFGLLCLPWLQEGSAFPTIPLSRLFDNAMLRADRLNQLAFDTYQEFEEAYIPKEQKYSFLQNPQTSLCFSESIPTPSNREETQQKSNLELLRISLLLIQSWLEPVQFLRSVFANSLVYGASDSNVYDLLKDLEERIQTLMGRLEDGSPRTGQIFKQTYSKFDTNSHNDDALLKNYGLLYCFNADMSRVSTFLRTVQCRSVEGSCGFGGRGGGGSGGGGSGGNGTGGGGSEFFSGSEATAAILSRAPWSLQSVNPGLKTNSSKEPKFTKCRSPERETFSCHWTDEVHHGTKNLGPIQLFYTRRNTQEWTQEWKECPDYVSAGENSCYFNSSFTSIWIPYCIKLTSNGGTVDEKCFSVDEIVQPDPPIALNWTLLNVSLTGIHADIQVRWEAPRNADIQKGWMVLEYELQYKEVNETKWKMMDPILTTSVPVYSLKVDKEYEVRVRSKQRNSGNYGEFSEVLYVTLPQMSQ

SEQ ID NO: 104 - protein, 480 aa, Artificial; identical to SEQ ID NO: 103
  synthesized growth hormone chimera

SEQ ID NO: 105 - protein, 480 aa, Artificial; identical to SEQ ID NO: 103
  synthesized growth hormone chimera

SEQ ID NO: 106 - protein, 484 aa, Artificial
  synthesized growth hormone chimera
MATGSRTSLLLAFGLLCLPWLQEGSAFPTIPLSRLFDNAMLRAHRLHQLAFDTYQEFEEAYIPKEQKYSFLQNPQTSLCFSESIPTPSNREETQQKSNLELLRISLLLIQSWLEPVQFLRSVFANSLVYGASDSNVYDLLKDLEERIQTLMGRLEDGSPRTGQIFKQTYSKFDTNSHNDDALLKNYGLLYCFRKDMDKVETFLRIVQCRSVEGSCGFGGRGGGGSGGGGSGWNGSGGGGSEFFSGSEATAAILSRAPWSLQSVNPGLKTNSSKEPKFTKCRSPERETFSCHWTDEVHHGTKNLGPIQLFYTRRNTQEWTQEWKECPDYVSAGENSCYFNSSFTSIWIPYCIKLTSNGGTVDEKCFSVDEIVQPDPPIALNWTLLNVSLTGIHADIQVRWEAPRNADIQKGWMVLEYELQYKEVNETKWKMMDPILTTSVPVYSLKVDKEYEVRVRSKQRNSGNYGEFSEVLYVTLPQMSQKLFE

SEQ ID NO: 107 - protein, 480 aa, Artificial
  synthesized growth hormone chimera
MATGSRTSLLLAFGLLCLPWLQEGSAFPTIPLSRLFDNAMLRAHRLHQLAFDTYQEFEEAYIPKEQKYSFLQNPQTSLCFSESIPTPSNREETQQKSNLELLRISLLLIQSWLEPVQFLRSVFANSLVYGASDSNVYDLLKDLEERIQTLMGRLEDGSPRTGQIFKQTYSKFDTNSHNDDALLKNYGLLYCFRKDMDKVETFLRIVQCRSVEGSCGFGGRGGGGSGGGGSGWNGSGGGGSEFFSGSEATAAILSRAPWSLQSVNPGLKTNSSKEPKFTKCRSPERETFSCHWTDEVHHGTKNLGPIQLFYTRRNTQEWTQEWKECPDYVSAGENSCYFNSSFTSIWIPYCIKLTSNGGTVDEKCFSVDEIVQPDPPIALNWTLLNVSLTGIHADIQVRWEAPRNADIQKGWMVLEYELQYKEVNETKWKMMDPILTTSVPVYSLKVDKEYEVRVRSKQRNSGNYGEFSEVLYVTLPQMSQ

SEQ ID NO: 108 - protein, 480 aa, Artificial
  synthesized growth hormone chimera
MATGSRTSLLLAFGLLCLPWLQEGSAFPTIPLSRLFDNAMLRAHRLHQLAFDTYQEFEEAYIPKEQKYSFLQNPQTSLCFSESIPTPSNREETQQKSNLELLRISLLLIQSWLEPVQFLRSVFANSLVYGASDSNVYDLLKDLEERIQTLMGRLEDGSPRTGQIFKQTYSKFDTNSHNDDALLKNYGLLYCFRKDMDKVETFLRIVQCRSVEGSCGFGGGGSGGGGSGWNGSGGGGSGGGGSFSGSEATAAILSRAPWSLQSVNPGLKTNSSKEPKFTKCRSPERETFSCHWTDEVHHGTKNLGPIQLFYTRRNTQEWTQEWKECPDYVSAGENSCYFNSSFTSIWIPYCIKLTSNGGTVDEKCFSVDEIVQPDPPIALNWTLLNVSLTGIHADIQVRWEAPRNADIQKGWMVLEYELQYKEVNETKWKMMDPILTTSVPVYSLKVDKEYEVRVRSKQRNSGNYGEFSEVLYVTLPQMSQ

SEQ ID NO: 109 - protein, 455 aa, Artificial; identical to SEQ ID NO: 93
  synthesized growth hormone chimera

SEQ ID NO: 110 - protein, 484 aa, Artificial
  synthesized growth hormone chimera
MATGSRTSLLLAFGLLCLPWLQEGSAFPTIPLSRLFDNAMLRADRLNQLAFDTYQEFEEAYIPKEQKYSFLQNPQTSLCFSESIPTPSNREETQQKSNLELLRISLLLIQSWLEPVQFLRSVFANSLVYGASDSNVYDLLKDLEERIQTLMGRLEDGSPRTGQIFKQTYSKFDTNSHNDDALLKNYGLLYCFNADMSRVSTFLRTVQCRSVEGSCGFGGRGGGGSGGGGSGWNGSGGGGSEFFSGSEATAAILSRAPWSLQSVNPGLKTNSSKEPKFTKCRSPERETFSCHWTDEVHHGTKNLGPIQLFYTRRNTQEWTQEWKECPDYVSAGENSCYFNSSFTSIWIPYCIKLTSNGGTVDEKCFSVDEIVQPDPPIALNWTLLNVSLTGIHADIQVRWEAPRNADIQKGWMVLEYELQYKEVNETKWKMMDPILTTSVPVYSLKVDKEYEVRVRSKQRNSGNYGEFSEVLYVTLPQMSQKLFE

SEQ ID NO: 111 - protein, 480 aa, Artificial
  synthesized growth hormone chimera
MATGSRTSLLLAFGLLCLPWLQEGSAFPTIPLSRLFDNAMLRADRLNQLAFDTYQEFEEAYIPKEQKYSFLQNPQTSLCFSESIPTPSNREETQQKSNLELLRISLLLIQSWLEPVQFLRSVFANSLVYGASDSNVYDLLKDLEERIQTLMGRLEDGSPRTGQIFKQTYSKFDTNSHNDDALLKNYGLLYCFNADMSRVSTFLRTVQCRSVEGSCGFGGRGGGGSGGGGSGWNGSGGGGSEFFSGSEATAAILSRAPWSLQSVNPGLKTNSSKEPKFTKCRSPERETFSCHWTDEVHHGTKNLGPIQLFYTRRNTQEWTQEWKECPDYVSAGENSCYFNSSFTSIWIPYCIKLTSNGGTVDEKCFSVDEIVQPDPPIALNWTLLNVSLTGIHADIQVRWEAPRNADIQKGWMVLEYELQYKEVNETKWKMMDPILTTSVPVYSLKVDKEYEVRVRSKQRNSGNYGEFSEVLYVTLPQMSQ

SEQ ID NO: 112 - protein, 480 aa, Artificial
  synthesized growth hormone chimera
MATGSRTSLLLAFGLLCLPWLQEGSAFPTIPLSRLFDNAMLRADRLNQLAFDTYQEFEEAYIPKEQKYSFLQNPQTSLCFSESIPTPSNREETQQKSNLELLRISLLLIQSWLEPVQFLRSVFANSLVYGASDSNVYDLLKDLEERIQTLMGRLEDGSPRTGQIFKQTYSKFDTNSHNDDALLKNYGLLYCFNADMSRVSTFLRTVQCRSVEGSCGFGGGGSGGGGSGWNGSGGGGSGGGGSFSGSEATAAILSRAPWSLQSVNPGLKTNSSKEPKFTKCRSPERETFSCHWTDEVHHGTKNLGPIQLFYTRRNTQEWTQEWKECPDYVSAGENSCYFNSSFTSIWIPYCIKLTSNGGTVDEKCFSVDEIVQPDPPIALNWTLLNVSLTGIHADIQVRWEAPRNADIQKGWMVLEYELQYKEVNETKWKMMDPILTTSVPVYSLKVDKEYEVRVRSKQRNSGNYGEFSEVLYVTLPQMSQ

SEQ ID NO: 113 - protein, 455 aa, Artificial; identical to SEQ ID NO: 97
  synthesized growth hormone chimera

SEQ ID NO: 114 - protein, 487 aa, Artificial
  synthesized growth hormone chimera
MATGSRTSLLLAFGLLCLPWLQEGSAFPTIPLSRLFDNAMLRAHRLHQLAFDTYQEFEEAYIPKEQKYSFLQNPQTSLCFSESIPTPSNREETQQKSNLELLRISLLLIQSWLEPVQFLRSVFANSLVYGASDSNVYDLLKDLEERIQTLMGRLEDGSPRTGQIFKQTYSKFDTNSHNDDALLKNYGLLYCFRKDMDKVETFLRIVQCRSVEGSCGFGGRGGGGSGGGGSGGGGSNATGGGGSEFFSGSEATAAILSRAPWSLQSVNPGLKTNSSKEPKFTKCRSPERETFSCHWTDEVHHGTKNLGPIQLFYTRRNTQEWTQEWKECPDYVSAGENSCYFNSSFTSIWIPYCIKLTSNGGTVDEKCFSVDEIVQPDPPIALNWTLLNVSLTGIHADIQVRWEAPRNADIQKGWMVLEYELQYKEVNETKWKMMDPILTTSVPVYSLKVDKEYEVRVRSKQRNSGNYGEFSEVLYVTLPQMSQKLFE

SEQ ID NO: 115 - protein, 483 aa, Artificial
  synthesized growth hormone chimera
MATGSRTSLLLAFGLLCLPWLQEGSAFPTIPLSRLFDNAMLRAHRLHQLAFDTYQEFEEAYIPKEQKYSFLQNPQTSLCFSESIPTPSNREETQQKSNLELLRISLLLIQSWLEPVQFLRSVFANSLVYGASDSNVYDLLKDLEERIQTLMGRLEDGSPRTGQIFKQTYSKFDTNSHNDDALLKNYGLLYCFRKDMDKVETFLRIVQCRSVEGSCGFGGRGGGGSGGGGSGGGGSNATGGGGSEFFSGSEATAAILSRAPWSLQSVNPGLKTNSSKEPKFTKCRSPERETFSCHWTDEVHHGTKNLGPIQLFYTRRNTQEWTQEWKECPDYVSAGENSCYFNSSFTSIWIPYCIKLTSNGGTVDEKCFSVDEIVQPDPPIALNWTLLNVSLTGIHADIQVRWEAPRNADIQKGWMVLEYELQYKEVNETKWKMMDPILTTSVPVYSLKVDKEYEVRVRSKQRNSGNYGEFSEVLYVTLPQMSQ

SEQ ID NO: 116 - protein, 483 aa, Artificial
  synthesized growth hormone chimera
MATGSRTSLLLAFGLLCLPWLQEGSAFPTIPLSRLFDNAMLRAHRLHQLAFDTYQEFEEAYIPKEQKYSFLQNPQTSLCFSESIPTPSNREETQQKSNLELLRISLLLIQSWLEPVQFLRSVFANSLVYGASDSNVYDLLKDLEERIQTLMGRLEDGSPRTGQIFKQTYSKFDTNSHNDDALLKNYGLLYCFRKDMDKVETFLRIVQCRSVEGSCGFGGGGSGGGGSGGGGSNATGGGGSGGGGSFSGSEATAAILSRAPWSLQSVNPGLKTNSSKEPKFTKCRSPERETFSCHWTDEVHHGTKNLGPIQLFYTRRNTQEWTQEWKECPDYVSAGENSCYFNSSFTSIWIPYCIKLTSNGGTVDEKCFSVDEIVQPDPPIALNWTLLNVSLTGIHADIQVRWEAPRNADIQKGWMVLEYELQYKEVNETKWKMMDPILTTSVPVYSLKVDKEYEVRVRSKQRNSGNYGEFSEVLYVTLPQMSQ

SEQ ID NO: 117 - protein, 455 aa, Artificial; identical to SEQ ID NO: 93
  synthesized growth hormone chimera

SEQ ID NO: 118 - protein, 487 aa, Artificial
  synthesized growth hormone chimera
MATGSRTSLLLAFGLLCLPWLQEGSAFPTIPLSRLFDNAMLRADRLNQLAFDTYQEFEEAYIPKEQKYSFLQNPQTSLCFSESIPTPSNREETQQKSNLELLRISLLLIQSWLEPVQFLRSVFANSLVYGASDSNVYDLLKDLEERIQTLMGRLEDGSPRTGQIFKQTYSKFDTNSHNDDALLKNYGLLYCFNADMSRVSTFLRTVQCRSVEGSCGFGGRGGGGSGGGGSGGGGSNATGGGGSEFFSGSEATAAILSRAPWSLQSVNPGLKTNSSKEPKFTKCRSPERETFSCHWTDEVHHGTKNLGPIQLFYTRRNTQEWTQEWKECPDYVSAGENSCYFNSSFTSIWIPYCIKLTSNGGTVDEKCFSVDEIVQPDPPIALNWTLLNVSLTGIHADIQVRWEAPRNADIQKGWMVLEYELQYKEVNETKWKMMDPILTTSVPVYSLKVDKEYEVRVRSKQRNSGNYGEFSEVLYVTLPQMSQKLFE

SEQ ID NO: 119 - protein, 483 aa, Artificial
  synthesized growth hormone chimera
MATGSRTSLLLAFGLLCLPWLQEGSAFPTIPLSRLFDNAMLRADRLNQLAFDTYQEFEEAYIPKEQKYSFLQNPQTSLCFSESIPTPSNREETQQKSNLELLRISLLLIQSWLEPVQFLRSVFANSLVYGASDSNVYDLLKDLEERIQTLMGRLEDGSPRTGQIFKQTYSKFDTNSHNDDALLKNYGLLYCFNADMSRVSTFLRTVQCRSVEGSCGFGGRGGGGSGGGGSGGGGSNATGGGGSEFFSGSEATAAILSRAPWSLQSVNPGLKTNSSKEPKFTKCRSPERETFSCHWTDEVHHGTKNLGPIQLFYTRRNTQEWTQEWKECPDYVSAGENSCYFNSSFTSIWIPYCIKLTSNGGTVDEKCFSVDEIVQPDPPIALNWTLLNVSLTGIHADIQVRWEAPRNADIQKGWMVLEYELQYKEVNETKWKMMDPILTTSVPVYSLKVDKEYEVRVRSKQRNSGNYGEFSEVLYVTLPQMSQ

SEQ ID NO: 120 - protein, 483 aa, Artificial
  synthesized growth hormone chimera
MATGSRTSLLLAFGLLCLPWLQEGSAFPTIPLSRLFDNAMLRADRLNQLAFDTYQEFEEAYIPKEQKYSFLQNPQTSLCFSESIPTPSNREETQQKSNLELLRISLLLIQSWLEPVQFLRSVFANSLVYGASDSNVYDLLKDLEERIQTLMGRLEDGSPRTGQIFKQTYSKFDTNSHNDDALLKNYGLLYCFNADMSRVSTFLRTVQCRSVEGSCGFGGGGSGGGGSGGGGSNATGGGGSGGGGSFSGSEATAAILSRAPWSLQSVNPGLKTNSSKEPKFTKCRSPERETFSCHWTDEVHHGTKNLGPIQLFYTRRNTQEWTQEWKECPDYVSAGENSCYFNSSFTSIWIPYCIKLTSNGGTVDEKCFSVDEIVQPDPPIALNWTLLNVSLTGIHADIQVRWEAPRNADIQKGWMVLEYELQYKEVNETKWKMMDPILTTSVPVYSLKVDKEYEVRVRSKQRNSGNYGEFSEVLYVTLPQMSQ

SEQ ID NO: 121 - protein, 455 aa, Artificial; identical to SEQ ID NO: 97
  synthesized growth hormone chimera

SEQ ID NO: 122 - protein, 433 aa, Artificial
  synthesized erythropoietin fusion protein
MGVHECPAWLWLLLSLLSLPLGLPVLGAPPRLICDSRVLERYLLEAKEAENITTGCAEHCSLNENITVPDTKVNFYAWKRMEVGQQAVEVWQGLALLSEAVLRGQALLVNSSQPWEPLQLHVDKAVSGLRSLTTLLRALGAQKEAISPPDAASAAPLRTITADTFRKLFRVYSNFLRGKLKLYTGEACRTGDRGGGGSGGGGSGGNGSGGGGSAPPPNLPDPKFESKAALLAARGPEELLCFTERLEDLVCFWEEAASAGVGPGNYSFSYQLEDEPWKLCRLHQAPTARGAVRFWCSLPTADTSSFVPLELRVTAASGAPRYHRVIHINEVVLLDAPVGLVARLADESGHVVLRWLPPPETPMTSHIRYEVDVSAGNGAGSVQRVEILEGRTECVLSNLRGRTRYTFAVRARMAEPSFGGFWSAWSEPVSLLT

SEQ ID NO: 123 - protein, 428 aa, Artificial
  synthesized erythropoeitin fusion protein
MGVHECPAWLWLLLSLLSLPLGLPVLGAPPRLICDSRVLERYLLEAKEAENITTGCAEHCSLNENITVPDTKVNFYAWKRMEVGQQAVEVWQGLALLSEAVLRGQALLVNSSQPWEPLQLHVDKAVSGLRSLTTLLRALGAQKEAISPPDAASAAPLRTITADTFRKLFRVYSNFLRGKLKLYTGEACRTGDRGGGGSGGGGSGGNGSAPPPNLPDPKFESKAALLAARGPEELLCFTERLEDLVCFWEEAASAGVGPGNYSFSYQLEDEPWKLCRLHQAPTARGAVRFWCSLPTADTSSFVPLELRVTAASGAPRYHRVIHINEVVLLDAPVGLVARLADESGHVVLRWLPPPETPMTSHIRYEVDVSAGNGAGSVQRVEILEGRTECVLSNLRGRTRYTFAVRARMAEPSFGGFWSAWSEPVSLLT

SEQ ID NO: 124 - protein, 433 aa, Artificial
  synthesized erythropoeitin fusion protein
MGVHECPAWLWLLLSLLSLPLGLPVLGAPPRLICDSRVLERYLLEAKEAENITTGCAEHCSLNENITVPDTKVNFYAWKRMEVGQQAVEVWQGLALLSEAVLRGQALLVNSSQPWEPLQLHVDKAVSGLRSLTTLLRALGAQKEAISPPDAASAAPLRTITADTFRKLFRVYSNFLRGKLKLYTGEACRTGDRGGGGSGGGGSGGNGTGGGGSAPPPNLPDPKFESKAALLAARGPEELLCFTERLEDLVCFWEEAASAGVGPGNYSFSYQLEDEPWKLCRLHQAPTARGAVRFWCSLPTADTSSFVPLELRVTAASGAPRYHRVIHINEVVLLDAPVGLVARLADESGHVVLRWLPPPETPMTSHIRYEVDVSAGNGAGSVQRVEILEGRTECVLSNLRGRTRYTFAVRARMAEPSFGGFWSAWSEPVSLLT

SEQ ID NO: 125 - protein, 428 aa, Artificial
  synthesized erythropoeitin fusion protein
MGVHECPAWLWLLLSLLSLPLGLPVLGAPPRLICDSRVLERYLLEAKEAENITTGCAEHCSLNENITVPDTKVNFYAWKRMEVGQQAVEVWQGLALLSEAVLRGQALLVNSSQPWEPLQLHVDKAVSGLRSLTTLLRALGAQKEAISPPDAASAAPLRTITADTFRKLFRVYSNFLRGKLKLYTGEACRTGDRGGGGSGGGGSGGNGTAPPPNLPDPKFESKAALLAARGPEELLCFTERLEDLVCFWEEAASAGVGPGNYSFSYQLEDEPWKLCRLHQAPTARGAVRFWCSLPTADTSSFVPLELRVTAASGAPRYHRVIHINEVVLLDAPVGLVARLADESGHVVLRWLPPPETPMTSHIRYEVDVSAGNGAGSVQRVEILEGRTECVLSNLRGRTRYTFAVRARMAEPSFGGFWSAWSEPVSLLT

SEQ ID NO: 126 - protein, 433 aa, Artificial
  synthesized erythropoeitin fusion  protein
MGVHECPAWLWLLLSLLSLPLGLPVLGAPPRLICDSRVLERYLLEAKEAENITTGCAEHCSLNENITVPDTKVNFYAWKRMEVGQQAVEVWQGLALLSEAVLRGQALLVNSSQPWEPLQLHVDKAVSGLRSLTTLLRALGAQKEAISPPDAASAAPLRTITADTFRKLFRVYSNFLRGKLKLYTGEACRTGDRGGGGSGGGGSGWNGSGGGGSAPPPNLPDPKFESKAALLAARGPEELLCFTERLEDLVCFWEEAASAGVGPGNYSFSYQLEDEPWKLCRLHQAPTARGAVRFWCSLPTADTSSFVPLELRVTAASGAPRYHRVIHINEVVLLDAPVGLVARLADESGHVVLRWLPPPETPMTSHIRYEVDVSAGNGAGSVQRVEILEGRTECVLSNLRGRTRYTFAVRARMAEPSFGGFWSAWSEPVSLLT

SEQ ID NO: 127 - protein, 428 aa, Artificial
  synthesized erythropoeitin fusion protein
MGVHECPAWLWLLLSLLSLPLGLPVLGAPPRLICDSRVLERYLLEAKEAENITTGCAEHCSLNENITVPDTKVNFYAWKRMEVGQQAVEVWQGLALLSEAVLRGQALLVNSSQPWEPLQLHVDKAVSGLRSLTTLLRALGAQKEAISPPDAASAAPLRTITADTFRKLFRVYSNFLRGKLKLYTGEACRTGDRGGGGSGGGGSGWNGSAPPPNLPDPKFESKAALLAARGPEELLCFTERLEDLVCFWEEAASAGVGPGNYSFSYQLEDEPWKLCRLHQAPTARGAVRFWCSLPTADTSSFVPLELRVTAASGAPRYHRVIHINEVVLLDAPVGLVARLADESGHVVLRWLPPPETPMTSHIRYEVDVSAGNGAGSVQRVEILEGRTECVLSNLRGRTRYTFAVRARMAEPSFGGFWSAWSEPVSLLT

SEQ ID NO: 128 - protein, 436 aa, Artificial
  synthesized erythropoeitin fusion protein
MGVHECPAWLWLLLSLLSLPLGLPVLGAPPRLICDSRVLERYLLEAKEAENITTGCAEHCSLNENITVPDTKVNFYAWKRMEVGQQAVEVWQGLALLSEAVLRGQALLVNSSQPWEPLQLHVDKAVSGLRSLTTLLRALGAQKEAISPPDAASAAPLRTITADTFRKLFRVYSNFLRGKLKLYTGEACRTGDRGGGGSGGGGSGGGGSNATGGGGSAPPPNLPDPKFESKAALLAARGPEELLCFTERLEDLVCFWEEAASAGVGPGNYSFSYQLEDEPWKLCRLHQAPTARGAVRFWCSLPTADTSSFVPLELRVTAASGAPRYHRVIHINEVVLLDAPVGLVARLADESGHVVLRWLPPPETPMTSHIRYEVDVSAGNGAGSVQRVEILEGRTECVLSNLRGRTRYTFAVRARMAEPSFGGFWSAWSEPVSLLT

SEQ ID NO: 129 - protein, 431 aa, Artificial
  synthesized erythropoeitin fusion protein
MGVHECPAWLWLLLSLLSLPLGLPVLGAPPRLICDSRVLERYLLEAKEAENITTGCAEHCSLNENITVPDTKVNFYAWKRMEVGQQAVEVWQGLALLSEAVLRGQALLVNSSQPWEPLQLHVDKAVSGLRSLTTLLRALGAQKEAISPPDAASAAPLRTITADTFRKLFRVYSNFLRGKLKLYTGEACRTGDRGGGGSGGGGSGGGGSNATAPPPNLPDPKFESKAALLAARGPEELLCFTERLEDLVCFWEEAASAGVGPGNYSFSYQLEDEPWKLCRLHQAPTARGAVRFWCSLPTADTSSFVPLELRVTAASGAPRYHRVIHINEVVLLDAPVGLVARLADESGHVVLRWLPPPETPMTSHIRYEVDVSAGNGAGSVQRVEILEGRTECVLSNLRGRTRYTFAVRARMAEPSFGGFWSAWSEPVSLLT

SEQ ID NO: 130 - protein, 541 aa, Artificial [sequence omitted]

SEQ ID NO: 131 - protein, 551 aa, Artificial [sequence omitted]

SEQ ID NO: 132 - protein, 434 aa, Artificial
  synthesized GCSF fusion  protein
MAGPATQSPMKLMALQLLLWHSALWTVQEATPLGPASSLPQSFLLKCLEQVRKIQGDGAALQEKLCATYKLCHPEELVLLGHSLGIPWAPLSSCPSQALQLAGCLSQLHSGLFLYQGLLQALEGISPELGPTLDTLQLDVADFATTIWQQMEELGMAPALQPTQGAMPAFASAFQRRAGGVLVASHLQSFLEVSYRVLRHLAQPGGGGSGGGGSGGNGSGGGGSGGGGSGGGGSECGHISVSAPIVHLGDPITASCIIKQNCSHLDPEPQILWRLGAELQPGGRQQRLSDGTQESIITLPHLNHTQAFLSCCLNWGNSLQILDQVELRAGYPPAIPHNLSCLMNLTTSSLICQWEPGPETHLPTSFTLKSFKSRGNCQTQGDSILDCVPKDGQSHCCIPRKHLLLYQNMGIWVQAENALGTSMSPQLCLDPMDV

SEQ ID NO: 133 - protein, 446 aa, Artificial
  synthesized GCSF fusion protein
MAGPATQSPMKLMALQLLLWHSALWTVQEATPLGPASSLPQSFLLKCLEQVRKIQGDGAALQEKLCATYKLCHPEELVLLGHSLGIPWAPLSSCPSQALQLAGCLSQLHSGLFLYQGLLQALEGISPELGPTLDTLQLDVADFATTIWQQMEELGMAPALQPTQGAMPAFASAFQRRAGGVLVASHLQSFLEVSYRVLRHLAQPGGGGSGGGGSGGGGSGGNGSGGGGSGGGGSGYPPAIPHNLSCLMNLTTSSLICQWEPGPETHLPTSFTLKSFKSRGNCQTQGDSILDCVPKDGQSHCCIPRKHLLLYQNMGIWVQAENALGTSMSPQLCLDPMDVVKLEPPMLRTMDPSPEAAPPQAGCLQLCWEPWQPGLHINQKCELRHKPQRGEASWALVGPLPLEALQYELCGLLPATAYTLQIRCIRWPLPGHWSDWSPSLELRTTE

SEQ ID NO: 134 - protein, 535 aa, Artificial
  synthesized GCSF fusion protein
MARLGNCSLTWAALIILLLPGSLEECGHISVSAPIVHLGDPITASCIIKQNCSHLDPEPQILWRLGAELQPGGRQQRLSDGTQESIITLPHLNHTQAFLSCCLNWGNSLQILDQVELRAGYPPAIPHNLSCLMNLTTSSLICQWEPGPETHLPTSFTLKSFKSRGNCQTQGDSILDCVPKDGQSHCCIPRKHLLLYQNMGIWVQAENALGTSMSPQLCLDPMDVVKLEPPMLRTMDPSPEAAPPQAGCLQLCWEPWQPGLHINQKCELRHKPQRGEASWALVGPLPLEALQYELCGLLPATAYTLQIRCIRWPLPGHWSDWSPSLELRTTEGGGGSGGGGSGGGGSGGNGSGGGGSGGGGSTPLGPASSLPQSFLLKCLEQVRKIQGDGAALQEKLCATYKLCHPEELVLLGHSLGIPWAPLSSCPSQALQLAGCLSQLHSGLFLYQGLLQALEGISPELGPTLDTLQLDVADFATTIWQQMEELGMAPALQPTQGAMPAFASAFQRRAGGVLVASHLQSFLEVSYRVLRHLAQP

SEQ ID NO: 135 - protein, 440 aa, Artificial
  synthesized GCSF fusion protein
MARLGNCSLTWAALIILLLPGSLEGYPPAIPHNLSCLMNLTTSSLICQWEPGPETHLPTSFTLKSFKSRGNCQTQGDSILDCVPKDGQSHCCIPRKHLLLYQNMGIWVQAENALGTSMSPQLCLDPMDVVKLEPPMLRTMDPSPEAAPPQAGCLQLCWEPWQPGLHINQKCELRHKPQRGEASWALVGPLPLEALQYELCGLLPATAYTLQIRCIRWPLPGHWSDWSPSLELRTTEGGGGSGGGGSGGGGSGGNGSGGGGSGGGGSTPLGPASSLPQSFLLKCLEQVRKIQGDGAALQEKLCATYKLCHPEELVLLGHSLGIPWAPLSSCPSQALQLAGCLSQLHSGLFLYQGLLQALEGISPELGPTLDTLQLDVADFATTIWQQMEELGMAPALQPTQGAMPAFASAFQRRAGGVLVASHLQSFLEVSYRVLRHLAQP

SEQ ID NO: 136 - protein, 541 aa, Artificial [sequence omitted]

SEQ ID NO: 137 - protein, 551 aa, Artificial [sequence omitted]

SEQ ID NO: 138 - protein, 434 aa, Artificial
  synthesized GCSF fusion protein
MAGPATQSPMKLMALQLLLWHSALWTVQEATPLGPASSLPQSFLLKCLEQVRKIQGDGAALQEKLCATYKLCHPEELVLLGHSLGIPWAPLSSCPSQALQLAGCLSQLHSGLFLYQGLLQALEGISPELGPTLDTLQLDVADFATTIWQQMEELGMAPALQPTQGAMPAFASAFQRRAGGVLVASHLQSFLEVSYRVLRHLAQPGGGGSGGGGSGGNGTGGGGSGGGGSGGGGSECGHISVSAPIVHLGDPITASCIIKQNCSHLDPEPQILWRLGAELQPGGRQQRLSDGTQESIITLPHLNHTQAFLSCCLNWGNSLQILDQVELRAGYPPAIPHNLSCLMNLTTSSLICQWEPGPETHLPTSFTLKSFKSRGNCQTQGDSILDCVPKDGQSHCCIPRKHLLLYQNMGIWVQAENALGTSMSPQLCLDPMDV

SEQ ID NO: 139 - protein, 446 aa, Artificial
  synthesized GCSF fusion protein
MAGPATQSPMKLMALQLLLWHSALWTVQEATPLGPASSLPQSFLLKCLEQVRKIQGDGAALQEKLCATYKLCHPEELVLLGHSLGIPWAPLSSCPSQALQLAGCLSQLHSGLFLYQGLLQALEGISPELGPTLDTLQLDVADFATTIWQQMEELGMAPALQPTQGAMPAFASAFQRRAGGVLVASHLQSFLEVSYRVLRHLAQPGGGGSGGGGSGGGGSGGNGTGGGGSGGGGSGYPPAIPHNLSCLMNLTTSSLICQWEPGPETHLPTSFTLKSFKSRGNCQTQGDSILDCVPKDGQSHCCIPRKHLLLYQNMGIWVQAENALGTSMSPQLCLDPMDVVKLEPPMLRTMDPSPEAAPPQAGCLQLCWEPWQPGLHINQKCELRHKPQRGEASWALVGPLPLEALQYELCGLLPATAYTLQIRCIRWPLPGHWSDWSPSLELRTTE

SEQ ID NO: 140 - protein, 535 aa, Artificial
  synthesized GCSF fusion protein
MARLGNCSLTWAALIILLLPGSLEECGHISVSAPIVHLGDPITASCIIKQNCSHLDPEPQILWRLGAELQPGGRQQRLSDGTQESIITLPHLNHTQAFLSCCLNWGNSLQILDQVELRAGYPPAIPHNLSCLMNLTTSSLICQWEPGPETHLPTSFTLKSFKSRGNCQTQGDSILDCVPKDGQSHCCIPRKHLLLYQNMGIWVQAENALGTSMSPQLCLDPMDVVKLEPPMLRTMDPSPEAAPPQAGCLQLCWEPWQPGLHINQKCELRHKPQRGEASWALVGPLPLEALQYELCGLLPATAYTLQIRCIRWPLPGHWSDWSPSLELRTTEGGGGSGGGGSGGGGSGGNGTGGGGSGGGGSTPLGPASSLPQSFLLKCLEQVRKIQGDGAALQEKLCATYKLCHPEELVLLGHSLGIPWAPLSSCPSQALQLAGCLSQLHSGLFLYQGLLQALEGISPELGPTLDTLQLDVADFATTIWQQMEELGMAPALQPTQGAMPAFASAFQRRAGGVLVASHLQSFLEVSYRVLRHLAQP

SEQ ID NO: 141 - protein, 440 aa, Artificial
  synthesized GCSF fusion protein
MARLGNCSLTWAALIILLLPGSLEGYPPAIPHNLSCLMNLTTSSLICQWEPGPETHLPTSFTLKSFKSRGNCQTQGDSILDCVPKDGQSHCCIPRKHLLLYQNMGIWVQAENALGTSMSPQLCLDPMDVVKLEPPMLRTMDPSPEAAPPQAGCLQLCWEPWQPGLHINQKCELRHKPQRGEASWALVGPLPLEALQYELCGLLPATAYTLQIRCIRWPLPGHWSDWSPSLELRTTEGGGGSGGGGSGGGGSGGNGTGGGGSGGGGSTPLGPASSLPQSFLLKCLEQVRKIQGDGAALQEKLCATYKLCHPEELVLLGHSLGIPWAPLSSCPSQALQLAGCLSQLHSGLFLYQGLLQALEGISPELGPTLDTLQLDVADFATTIWQQMEELGMAPALQPTQGAMPAFASAFQRRAGGVLVASHLQSFLEVSYRVLRHLAQP

SEQ ID NO: 142 - protein, 541 aa, Artificial [sequence omitted]

SEQ ID NO: 143 - protein, 551 aa, Artificial [sequence omitted]

SEQ ID NO: 144 - protein, 434 aa, Artificial
  synthesized GCSF fusion protein
MAGPATQSPMKLMALQLLLWHSALWTVQEATPLGPASSLPQSFLLKCLEQVRKIQGDGAALQEKLCATYKLCHPEELVLLGHSLGIPWAPLSSCPSQALQLAGCLSQLHSGLFLYQGLLQALEGISPELGPTLDTLQLDVADFATTIWQQMEELGMAPALQPTQGAMPAFASAFQRRAGGVLVASHLQSFLEVSYRVLRHLAQPGGGGSGGGGSGWNGSGGGGSGGGGSGGGGSECGHISVSAPIVHLGDPITASCIIKQNCSHLDPEPQILWRLGAELQPGGRQQRLSDGTQESIITLPHLNHTQAFLSCCLNWGNSLQILDQVELRAGYPPAIPHNLSCLMNLTTSSLICQWEPGPETHLPTSFTLKSFKSRGNCQTQGDSILDCVPKDGQSHCCIPRKHLLLYQNMGIWVQAENALGTSMSPQLCLDPMDV

SEQ ID NO: 145 - protein, 446 aa, Artificial
  synthesized GCSF fusion protein
MAGPATQSPMKLMALQLLLWHSALWTVQEATPLGPASSLPQSFLLKCLEQVRKIQGDGAALQEKLCATYKLCHPEELVLLGHSLGIPWAPLSSCPSQALQLAGCLSQLHSGLFLYQGLLQALEGISPELGPTLDTLQLDVADFATTIWQQMEELGMAPALQPTQGAMPAFASAFQRRAGGVLVASHLQSFLEVSYRVLRHLAQPGGGGSGGGGSGGGGSGWNGSGGGGSGGGGSGYPPAIPHNLSCLMNLTTSSLICQWEPGPETHLPTSFTLKSFKSRGNCQTQGDSILDCVPKDGQSHCCIPRKHLLLYQNMGIWVQAENALGTSMSPQLCLDPMDVVKLEPPMLRTMDPSPEAAPPQAGCLQLCWEPWQPGLHINQKCELRHKPQRGEASWALVGPLPLEALQYELCGLLPATAYTLQIRCIRWPLPGHWSDWSPSLELRTTE

SEQ ID NO: 146 - protein, 535 aa, Artificial
  synthesized GCSF fusion protein
MARLGNCSLTWAALIILLLPGSLEECGHISVSAPIVHLGDPITASCIIKQNCSHLDPEPQILWRLGAELQPGGRQQRLSDGTQESIITLPHLNHTQAFLSCCLNWGNSLQILDQVELRAGYPPAIPHNLSCLMNLTTSSLICQWEPGPETHLPTSFTLKSFKSRGNCQTQGDSILDCVPKDGQSHCCIPRKHLLLYQNMGIWVQAENALGTSMSPQLCLDPMDVVKLEPPMLRTMDPSPEAAPPQAGCLQLCWEPWQPGLHINQKCELRHKPQRGEASWALVGPLPLEALQYELCGLLPATAYTLQIRCIRWPLPGHWSDWSPSLELRTTEGGGGSGGGGSGGGGSGWNGSGGGGSGGGGSTPLGPASSLPQSFLLKCLEQVRKIQGDGAALQEKLCATYKLCHPEELVLLGHSLGIPWAPLSSCPSQALQLAGCLSQLHSGLFLYQGLLQALEGISPELGPTLDTLQLDVADFATTIWQQMEELGMAPALQPTQGAMPAFASAFQRRAGGVLVASHLQSFLEVSYRVLRHLAQP

SEQ ID NO: 147 - protein, 440 aa, Artificial
  synthesized GCSF fusion protein
MARLGNCSLTWAALIILLLPGSLEGYPPAIPHNLSCLMNLTTSSLICQWEPGPETHLPTSFTLKSFKSRGNCQTQGDSILDCVPKDGQSHCCIPRKHLLLYQNMGIWVQAENALGTSMSPQLCLDPMDVVKLEPPMLRTMDPSPEAAPPQAGCLQLCWEPWQPGLHINQKCELRHKPQRGEASWALVGPLPLEALQYELCGLLPATAYTLQIRCIRWPLPGHWSDWSPSLELRTTEGGGGSGGGGSGGGGSGWNGSGGGGSGGGGSTPLGPASSLPQSFLLKCLEQVRKIQGDGAALQEKLCATYKLCHPEELVLLGHSLGIPWAPLSSCPSQALQLAGCLSQLHSGLFLYQGLLQALEGISPELGPTLDTLQLDVADFATTIWQQMEELGMAPALQPTQGAMPAFASAFQRRAGGVLVASHLQSFLEVSYRVLRHLAQP

SEQ ID NO: 148 - protein, 544 aa, Artificial [sequence omitted]

SEQ ID NO: 149 - protein, 554 aa, Artificial [sequence omitted]

SEQ ID NO: 150 - protein, 437 aa, Artificial [sequence omitted]

SEQ ID NO: 151 - protein, 449 aa, Artificial [sequence omitted]

SEQ ID NO: 152 - protein, 538 aa, Artichoke italian latent virus [sequence omitted]

SEQ ID NO: 153 - protein, 443 aa, Artificial
  synthesized GCSF fusion protein
MARLGNCSLTWAALIILLLPGSLEGYPPAIPHNLSCLMNLTTSSLICQWEPGPETHLPTSFTLKSFKSRGNCQTQGDSILDCVPKDGQSHCCIPRKHLLLYQNMGIWVQAENALGTSMSPQLCLDPMDVVKLEPPMLRTMDPSPEAAPPQAGCLQLCWEPWQPGLHINQKCELRHKPQRGEASWALVGPLPLEALQYELCGLLPATAYTLQIRCIRWPLPGHWSDWSPSLELRTTEGGGGSGGGGSGGGGSGGGGSNATGGGGSGGGGSTPLGPASSLPQSFLLKCLEQVRKIQGDGAALQEKLCATYKLCHPEELVLLGHSLGIPWAPLSSCPSQALQLAGCLSQLHSGLFLYQGLLQALEGISPELGPTLDTLQLDVADFATTIWQQMEELGMAPALQPTQGAMPAFASAFQRRAGGVLVASHLQSFLEVSYRVLRHLAQP

SEQ ID NO: 154 - protein, 626 aa, Artificial
  synthesized interferon fusion protein
MTNKCLLQIALLLCFSTTALSMSYNLLGFLQRSSNFQCQKLLWQLNGRLEYCLKDRMNFDIPEEIKQLQQFQKEDAALTIYEMLQNIFAIFRQDSSSTGWNETIVENLLANVYHQINHLKTVLEEKLEKEDFTRGKLMSSLHLKRYYGRILHYLKAKEYSHCAWTIVRVEILRNFYFINRLTGYLRNGGGGSGGGGSGGGGSGGNGSGGGGSGGGGSKNLKSPQKVEVDIIDDNFILRWNRSDESVGNVTFSFDYQKTGMDNWIKLSGCQNITSTKCNFSSLKLNVYEEIKLRIRAEKENTSSWYEVDSFTPFRKAQIGPPEVHLEAEDKAIVIHISPGTKDSVMWALDGLSFTYSLLIWKNSSGVEERIENIYSRHKIYKLSPETTYCLKVKAALLTSWKIGVYSPVHCIKTTVENELPPPENIEVSVQNQNYVLKWDYTYANMTFQVQWLHAFLKRNPGNHLYKWKQIPDCENVKTTQCVFPQNVFQKGIYLLRVQASDGNNTSFWSEEIKFDTEIQAFLLPPVFNIRSLSDSFHIYIGAPKQSGNTPVIQDYPLIYEIIFWENTSNAERKIIEKKTDVTVPNLKPLTVYCVKARAHTMDEKLNKSSVFSDAVCEKTKPGNTSK

SEQ ID NO: 155 - protein, 429 aa, Artificial
  synthesized interferon fusion protein
MTNKCLLQIALLLCFSTTALSMSYNLLGFLQRSSNFQCQKLLWQLNGRLEYCLKDRMNFDIPEEIKQLQQFQKEDAALTIYEMLQNIFAIFRQDSSSTGWNETIVENLLANVYHQINHLKTVLEEKLEKEDFTRGKLMSSLHLKRYYGRILHYLKAKEYSHCAWTIVRVEILRNFYFINRLTGYLRNGGGGSGGGGSGGGGSGGNGSGGGGSISYDSPDYTDESCTFKISLRNFRSILSWELKNHSIVPTHYTLLYTIMSKPEDLKVVKNCANTTRSFCDLTDEWRSTHEAYVTVLEGFSGNTTLFSCSHNFWLAIDMSFEPPEFEIVGFTNHINVVVKFPSIVEEELQFDLSLVIEEQSEGIVKKHKPEIKGNMSGNFTYIIDKLIPNTNYCVSVYLEHSDEQAVIKSPLKCTLLPPGQESESAESAK

SEQ ID NO: 156 - protein, 632 aa, Artificial
  synthesized interferon fusion protein
MMVVLLGATTLVLVAVGPWVLSAAAGGKNLKSPQKVEVDIIDDNFILRWNRSDESVGNVTFSFDYQKTGMDNWIKLSGCQNITSTKCNFSSLKLNVYEEIKLRIRAEKENTSSWYEVDSFTPFRKAQIGPPEVHLEAEDKAIVIHISPGTKDSVMWALDGLSFTYSLLIWKNSSGVEERIENIYSRHKIYKLSPETTYCLKVKAALLTSWKIGVYSPVHCIKTTVENELPPPENIEVSVQNQNYVLKWDYTYANMTFQVQWLHAFLKRNPGNHLYKWKQIPDCENVKTTQCVFPQNVFQKGIYLLRVQASDGNNTSFWSEEIKFDTEIQAFLLPPVFNIRSLSDSFHIYIGAPKQSGNTPVIQDYPLIYEIIFWENTSNAERKIIEKKTDVTVPNLKPLTVYCVKARAHTMDEKLNKSSVFSDAVCEKTKPGNTSKGGGGSGGGGSGGGGSGGNGSGGGGSGGGGSMSYNLLGFLQRSSNFQCQKLLWQLNGRLEYCLKDRMNFDIPEEIKQLQQFQKEDAALTIYEMLQNIFAIFRQDSSSTGWNETIVENLLANVYHQINHLKTVLEEKLEKEDFTRGKLMSSLHLKRYYGRILHYLKAKEYSHCAWTIVRVEILRNFYFINRLTGYLRN

SEQ ID NO: 157 - protein, 434 aa, Artificial
  synthesized inteferon fusion protein
MLLSQNAFIFRSLNLVLMVYISLVFGISYDSPDYTDESCTFKISLRNFRSILSWELKNHSIVPTHYTLLYTIMSKPEDLKVVKNCANTTRSFCDLTDEWRSTHEAYVTVLEGFSGNTTLFSCSHNFWLAIDMSFEPPEFEIVGFTNHINVVVKFPSIVEEELQFDLSLVIEEQSEGIVKKHKPEIKGNMSGNFTYIIDKLIPNTNYCVSVYLEHSDEQAVIKSPLKCTLLPPGQESESAESAKGGGGSGGGGSGGGGSGGNGSGGGGSMSYNLLGFLQRSSNFQCQKLLWQLNGRLEYCLKDRMNFDIPEEIKQLQQFQKEDAALTIYEMLQNIFAIFRQDSSSTGWNETIVENLLANVYHQINHLKTVLEEKLEKEDFTRGKLMSSLHLKRYYGRILHYLKAKEYSHCAWTIVRVEILRNFYFINRLTGYLRN

SEQ ID NO: 158 - protein, 430 aa, Artificial
  synthesized interferon fusion protein
MALTFALLVALLVLSCKSSCSVGCDLPQTHSLGSRRTLMLLAQMRRISLFSCLKDRHDFGFPQEEFGNQFQKAETIPVLHEMIQQIFNLFSTKDSSAAWDETLLDKFYTELYQQLNDLEACVIQGVGVTETPLMKEDSILAVRKYFQRITLYLKEKKYSPCAWEVVRAEIMRSFSLSTNLQESLRSKEGGGGSGGGGSGGGGSGGNGSGGGGSISYDSPDYTDESCTFKISLRNFRSILSWELKNHSIVPTHYTLLYTIMSKPEDLKVVKNCANTTRSFCDLTDEWRSTHEAYVTVLEGFSGNTTLFSCSHNFWLAIDMSFEPPEFEIVGFTNHINVVVKFPSIVEEELQFDLSLVIEEQSEGIVKKHKPEIKGNMSGNFTYIIDKLIPNTNYCVSVYLEHSDEQAVIKSPLKCTLLPPGQESESAESAK

SEQ ID NO: 159 - protein, 626 aa, Artificial
  synthesized interferon fusion protein
MTNKCLLQIALLLCFSTTALSMSYNLLGFLQRSSNFQCQKLLWQLNGRLEYCLKDRMNFDIPEEIKQLQQFQKEDAALTIYEMLQNIFAIFRQDSSSTGWNETIVENLLANVYHQINHLKTVLEEKLEKEDFTRGKLMSSLHLKRYYGRILHYLKAKEYSHCAWTIVRVEILRNFYFINRLTGYLRNGGGGSGGGGSGGGGSGGNGTGGGGSGGGGSKNLKSPQKVEVDIIDDNFILRWNRSDESVGNVTFSFDYQKTGMDNWIKLSGCQNITSTKCNFSSLKLNVYEEIKLRIRAEKENTSSWYEVDSFTPFRKAQIGPPEVHLEAEDKAIVIHISPGTKDSVMWALDGLSFTYSLLIWKNSSGVEERIENIYSRHKIYKLSPETTYCLKVKAALLTSWKIGVYSPVHCIKTTVENELPPPENIEVSVQNQNYVLKWDYTYANMTFQVQWLHAFLKRNPGNHLYKWKQIPDCENVKTTQCVFPQNVFQKGIYLLRVQASDGNNTSFWSEEIKFDTEIQAFLLPPVFNIRSLSDSFHIYIGAPKQSGNTPVIQDYPLIYEIIFWENTSNAERKIIEKKTDVTVPNLKPLTVYCVKARAHTMDEKLNKSSVFSDAVCEKTKPGNTSK

SEQ ID NO: 160 - protein, 429 aa, Artificial
  synthesized interferon fusion protein
MTNKCLLQIALLLCFSTTALSMSYNLLGFLQRSSNFQCQKLLWQLNGRLEYCLKDRMNFDIPEEIKQLQQFQKEDAALTIYEMLQNIFAIFRQDSSSTGWNETIVENLLANVYHQINHLKTVLEEKLEKEDFTRGKLMSSLHLKRYYGRILHYLKAKEYSHCAWTIVRVEILRNFYFINRLTGYLRNGGGGSGGGGSGGGGSGGNGTGGGGSISYDSPDYTDESCTFKISLRNFRSILSWELKNHSIVPTHYTLLYTIMSKPEDLKVVKNCANTTRSFCDLTDEWRSTHEAYVTVLEGFSGNTTLFSCSHNFWLAIDMSFEPPEFEIVGFTNHINVVVKFPSIVEEELQFDLSLVIEEQSEGIVKKHKPEIKGNMSGNFTYIIDKLIPNTNYCVSVYLEHSDEQAVIKSPLKCTLLPPGQESESAESAK

SEQ ID NO: 161 - protein, 632 aa, Artificial
  synthesized interferon fusion protein
MMVVLLGATTLVLVAVGPWVLSAAAGGKNLKSPQKVEVDIIDDNFILRWNRSDESVGNVTFSFDYQKTGMDNWIKLSGCQNITSTKCNFSSLKLNVYEEIKLRIRAEKENTSSWYEVDSFTPFRKAQIGPPEVHLEAEDKAIVIHISPGTKDSVMWALDGLSFTYSLLIWKNSSGVEERIENIYSRHKIYKLSPETTYCLKVKAALLTSWKIGVYSPVHCIKTTVENELPPPENIEVSVQNQNYVLKWDYTYANMTFQVQWLHAFLKRNPGNHLYKWKQIPDCENVKTTQCVFPQNVFQKGIYLLRVQASDGNNTSFWSEEIKFDTEIQAFLLPPVFNIRSLSDSFHIYIGAPKQSGNTPVIQDYPLIYEIIFWENTSNAERKIIEKKTDVTVPNLKPLTVYCVKARAHTMDEKLNKSSVFSDAVCEKTKPGNTSKGGGGSGGGGSGGGGSGGNGTGGGGSGGGGSMSYNLLGFLQRSSNFQCQKLLWQLNGRLEYCLKDRMNFDIPEEIKQLQQFQKEDAALTIYEMLQNIFAIFRQDSSSTGWNETIVENLLANVYHQINHLKTVLEEKLEKEDFTRGKLMSSLHLKRYYGRILHYLKAKEYSHCAWTIVRVEILRNFYFINRLTGYLRN

SEQ ID NO: 162 - protein, 434 aa, Artificial
  synthesized interferon fusion protein
MLLSQNAFIFRSLNLVLMVYISLVFGISYDSPDYTDESCTFKISLRNFRSILSWELKNHSIVPTHYTLLYTIMSKPEDLKVVKNCANTTRSFCDLTDEWRSTHEAYVTVLEGFSGNTTLFSCSHNFWLAIDMSFEPPEFEIVGFTNHINVVVKFPSIVEEELQFDLSLVIEEQSEGIVKKHKPEIKGNMSGNFTYIIDKLIPNTNYCVSVYLEHSDEQAVIKSPLKCTLLPPGQESESAESAKGGGGSGGGGSGGGGSGGNGTGGGGSMSYNLLGFLQRSSNFQCQKLLWQLNGRLEYCLKDRMNFDIPEEIKQLQQFQKEDAALTIYEMLQNIFAIFRQDSSSTGWNETIVENLLANVYHQINHLKTVLEEKLEKEDFTRGKLMSSLHLKRYYGRILHYLKAKEYSHCAWTIVRVEILRNFYFINRLTGYLRN

SEQ ID NO: 163 - protein, 430 aa, Artificial
  synthesized interferon fusion protein
MALTFALLVALLVLSCKSSCSVGCDLPQTHSLGSRRTLMLLAQMRRISLFSCLKDRHDFGFPQEEFGNQFQKAETIPVLHEMIQQIFNLFSTKDSSAAWDETLLDKFYTELYQQLNDLEACVIQGVGVTETPLMKEDSILAVRKYFQRITLYLKEKKYSPCAWEVVRAEIMRSFSLSTNLQESLRSKEGGGGSGGGGSGGGGSGGNGTGGGGSISYDSPDYTDESCTFKISLRNFRSILSWELKNHSIVPTHYTLLYTIMSKPEDLKVVKNCANTTRSFCDLTDEWRSTHEAYVTVLEGFSGNTTLFSCSHNFWLAIDMSFEPPEFEIVGFTNHINVVVKFPSIVEEELQFDLSLVIEEQSEGIVKKHKPEIKGNMSGNFTYIIDKLIPNTNYCVSVYLEHSDEQAVIKSPLKCTLLPPGQESESAESAK

SEQ ID NO: 164 - protein, 626 aa, Artificial
  synthesized interferon fusion protein
MTNKCLLQIALLLCFSTTALSMSYNLLGFLQRSSNFQCQKLLWQLNGRLEYCLKDRMNFDIPEEIKQLQQFQKEDAALTIYEMLQNIFAIFRQDSSSTGWNETIVENLLANVYHQINHLKTVLEEKLEKEDFTRGKLMSSLHLKRYYGRILHYLKAKEYSHCAWTIVRVEILRNFYFINRLTGYLRNGGGGSGGGGSGGGGSGWNGSGGGGSGGGGSKNLKSPQKVEVDIIDDNFILRWNRSDESVGNVTFSFDYQKTGMDNWIKLSGCQNITSTKCNFSSLKLNVYEEIKLRIRAEKENTSSWYEVDSFTPFRKAQIGPPEVHLEAEDKAIVIHISPGTKDSVMWALDGLSFTYSLLIWKNSSGVEERIENIYSRHKIYKLSPETTYCLKVKAALLTSWKIGVYSPVHCIKTTVENELPPPENIEVSVQNQNYVLKWDYTYANMTFQVQWLHAFLKRNPGNHLYKWKQIPDCENVKTTQCVFPQNVFQKGIYLLRVQASDGNNTSFWSEEIKFDTEIQAFLLPPVFNIRSLSDSFHIYIGAPKQSGNTPVIQDYPLIYEIIFWENTSNAERKIIEKKTDVTVPNLKPLTVYCVKARAHTMDEKLNKSSVFSDAVCEKTKPGNTSK

SEQ ID NO: 165 - protein, 429 aa, Artificial
  synthesized interferon fusion protein
MTNKCLLQIALLLCFSTTALSMSYNLLGFLQRSSNFQCQKLLWQLNGRLEYCLKDRMNFDIPEEIKQLQQFQKEDAALTIYEMLQNIFAIFRQDSSSTGWNETIVENLLANVYHQINHLKTVLEEKLEKEDFTRGKLMSSLHLKRYYGRILHYLKAKEYSHCAWTIVRVEILRNFYFINRLTGYLRNGGGGSGGGGSGGGGSGWNGSGGGGSISYDSPDYTDESCTFKISLRNFRSILSWELKNHSIVPTHYTLLYTIMSKPEDLKVVKNCANTTRSFCDLTDEWRSTHEAYVTVLEGFSGNTTLFSCSHNFWLAIDMSFEPPEFEIVGFTNHINVVVKFPSIVEEELQFDLSLVIEEQSEGIVKKHKPEIKGNMSGNFTYIIDKLIPNTNYCVSVYLEHSDEQAVIKSPLKCTLLPPGQESESAESAK

SEQ ID NO: 166 - protein, 632 aa, Artificial
  synthesized interferon fusion protein
MMVVLLGATTLVLVAVGPWVLSAAAGGKNLKSPQKVEVDIIDDNFILRWNRSDESVGNVTFSFDYQKTGMDNWIKLSGCQNITSTKCNFSSLKLNVYEEIKLRIRAEKENTSSWYEVDSFTPFRKAQIGPPEVHLEAEDKAIVIHISPGTKDSVMWALDGLSFTYSLLIWKNSSGVEERIENIYSRHKIYKLSPETTYCLKVKAALLTSWKIGVYSPVHCIKTTVENELPPPENIEVSVQNQNYVLKWDYTYANMTFQVQWLHAFLKRNPGNHLYKWKQIPDCENVKTTQCVFPQNVFQKGIYLLRVQASDGNNTSFWSEEIKFDTEIQAFLLPPVFNIRSLSDSFHIYIGAPKQSGNTPVIQDYPLIYEIIFWENTSNAERKIIEKKTDVTVPNLKPLTVYCVKARAHTMDEKLNKSSVFSDAVCEKTKPGNTSKGGGGSGGGGSGGGGSGWNGSGGGGSGGGGSMSYNLLGFLQRSSNFQCQKLLWQLNGRLEYCLKDRMNFDIPEEIKQLQQFQKEDAALTIYEMLQNIFAIFRQDSSSTGWNETIVENLLANVYHQINHLKTVLEEKLEKEDFTRGKLMSSLHLKRYYGRILHYLKAKEYSHCAWTIVRVEILRNFYFINRLTGYLRN

SEQ ID NO: 167 - protein, 434 aa, Artificial [sequence omitted]

SEQ ID NO: 168 - protein, 430 aa, Artificial
  synthesized interferon fusion protein
MALTFALLVALLVLSCKSSCSVGCDLPQTHSLGSRRTLMLLAQMRRISLFSCLKDRHDFGFPQEEFGNQFQKAETIPVLHEMIQQIFNLFSTKDSSAAWDETLLDKFYTELYQQLNDLEACVIQGVGVTETPLMKEDSILAVRKYFQRITLYLKEKKYSPCAWEVVRAEIMRSFSLSTNLQESLRSKEGGGGSGGGGSGGGGSGWNGSGGGGSISYDSPDYTDESCTFKISLRNFRSILSWELKNHSIVPTHYTLLYTIMSKPEDLKVVKNCANTTRSFCDLTDEWRSTHEAYVTVLEGFSGNTTLFSCSHNFWLAIDMSFEPPEFEIVGFTNHINVVVKFPSIVEEELQFDLSLVIEEQSEGIVKKHKPEIKGNMSGNFTYIIDKLIPNTNYCVSVYLEHSDEQAVIKSPLKCTLLPPGQESESAESAK

SEQ ID NO: 169 - protein, 629 aa, Artificial
  synthesized interferon fusion protein
MTNKCLLQIALLLCFSTTALSMSYNLLGFLQRSSNFQCQKLLWQLNGRLEYCLKDRMNFDIPEEIKQLQQFQKEDAALTIYEMLQNIFAIFRQDSSSTGWNETIVENLLANVYHQINHLKTVLEEKLEKEDFTRGKLMSSLHLKRYYGRILHYLKAKEYSHCAWTIVRVEILRNFYFINRLTGYLRNGGGGSGGGGSGGGGSGGGGSNATGGGGSGGGGSKNLKSPQKVEVDIIDDNFILRWNRSDESVGNVTFSFDYQKTGMDNWIKLSGCQNITSTKCNFSSLKLNVYEEIKLRIRAEKENTSSWYEVDSFTPFRKAQIGPPEVHLEAEDKAIVIHISPGTKDSVMWALDGLSFTYSLLIWKNSSGVEERIENIYSRHKIYKLSPETTYCLKVKAALLTSWKIGVYSPVHCIKTTVENELPPPENIEVSVQNQNYVLKWDYTYANMTFQVQWLHAFLKRNPGNHLYKWKQIPDCENVKTTQCVFPQNVFQKGIYLLRVQASDGNNTSFWSEEIKFDTEIQAFLLPPVFNIRSLSDSFHIYIGAPKQSGNTPVIQDYPLIYEIIFWENTSNAERKIIEKKTDVTVPNLKPLTVYCVKARAHTMDEKLNKSSVFSDAVCEKTKPGNTSK

SEQ ID NO: 170 - protein, 432 aa, Artificial
  synthesized interferon fusion protein
MTNKCLLQIALLLCFSTTALSMSYNLLGFLQRSSNFQCQKLLWQLNGRLEYCLKDRMNFDIPEEIKQLQQFQKEDAALTIYEMLQNIFAIFRQDSSSTGWNETIVENLLANVYHQINHLKTVLEEKLEKEDFTRGKLMSSLHLKRYYGRILHYLKAKEYSHCAWTIVRVEILRNFYFINRLTGYLRNGGGGSGGGGSGGGGSGGGGSNATGGGGSISYDSPDYTDESCTFKISLRNFRSILSWELKNHSIVPTHYTLLYTIMSKPEDLKVVKNCANTTRSFCDLTDEWRSTHEAYVTVLEGFSGNTTLFSCSHNFWLAIDMSFEPPEFEIVGFTNHINVVVKFPSIVEEELQFDLSLVIEEQSEGIVKKHKPEIKGNMSGNFTYIIDKLIPNTNYCVSVYLEHSDEQAVIKSPLKCTLLPPGQESESAESAK

SEQ ID NO: 171 - protein, 635 aa, Artificial [sequence omitted]

SEQ ID NO: 172 - protein, 635 aa, Artificial [sequence omitted]

SEQ ID NO: 173 - protein, 433 aa, Artificial
  synthesized interferon fusion protein
MALTFALLVALLVLSCKSSCSVGCDLPQTHSLGSRRTLMLLAQMRRISLFSCLKDRHDFGFPQEEFGNQFQKAETIPVLHEMIQQIFNLFSTKDSSAAWDETLLDKFYTELYQQLNDLEACVIQGVGVTETPLMKEDSILAVRKYFQRITLYLKEKKYSPCAWEVVRAEIMRSFSLSTNLQESLRSKEGGGGSGGGGSGGGGSGGGGSNATGGGGSISYDSPDYTDESCTFKISLRNFRSILSWELKNHSIVPTHYTLLYTIMSKPEDLKVVKNCANTTRSFCDLTDEWRSTHEAYVTVLEGFSGNTTLFSCSHNFWLAIDMSFEPPEFEIVGFTNHINVVVKFPSIVEEELQFDLSLVIEEQSEGIVKKHKPEIKGNMSGNFTYIIDKLIPNTNYCVSVYLEHSDEQAVIKSPLKCTLLPPGQESESAESAK

SEQ ID NO: 174 - protein, 260 aa, Artificial
  synthesized IGF 1 fusion protein
MGKISSLPTQLFKCCFCDFLKGPETLCGAELVDALQFVCGDRGFYFNKPTGYGSSSRRAPQTGIVDECCFRSCDLRRLEMYCAPLKPAKSAGGGGSGGGGSGGNGSGGGGSEICGPGIDIRNDYQQLKRLENCTVIEGYLHILLISKAEDYRSYRFPKLTVITEYLLLFRVAGLESLGDLFPNLTVIRGWKLFYNYALVIFEMTNLKDIGLYNLRNITRGAIRIEKNADLCYLSTVDWSLILDAVSNNYIVGNKPPKECG

SEQ ID NO: 175 - protein, 269 aa, Artificial
  synthesized IGF1 fusion protein
MKSGSGGGSPTSLWGLLFLSAALSLWPTSGEICGPGIDIRNDYQQLKRLENCTVIEGYLHILLISKAEDYRSYRFPKLTVITEYLLLFRVAGLESLGDLFPNLTVIRGWKLFYNYALVIFEMTNLKDIGLYNLRNITRGAIRIEKNADLCYLSTVDWSLILDAVSNNYIVGNKPPKECGGGGGSGGGGSGGNGSGGGGSGPETLCGAELVDALQFVCGDRGFYFNKPTGYGSSSRRAPQTGIVDECCFRSCDLRRLEMYCAPLKPAKSA

SEQ ID NO: 176 - protein, 370 aa, Artificial
  synthesized IGF1 fusion protein
MGKISSLPTQLFKCCFCDFLKGPETLCGAELVDALQFVCGDRGFYFNKPTGYGSSSRRAPQTGIVDECCFRSCDLRRLEMYCAPLKPAKSAGGGGSGGGGSGGNGSGGGGSECCHPECLGSCSAPDNDTACVACRHYYYAGVCVPACPPNTYRFEGWRCVDRDFCANILSAESSDSEGFVIHDGECMQECPSGFIRNGSQSMYCIPCEGPCPKVCEEEKKTKTIDSVTSAQMLQGCTIFKGNLLINIRRGNNIASELENFMGLIEVVTGYVKIRHSHALVSLSFLKNLRLILGEEQLEGNYSFYVLDNQNLQQLWDWDHRNLTIKAGKMYFAFNPKLCVSEIYRMEEVTGTKGRQSKGDINTRNNGERAS

SEQ ID NO: 177 - protein, 379 aa, Artificial
  synthesized IGF1 fusion protein
MKSGSGGGSPTSLWGLLFLSAALSLWPTSGECCHPECLGSCSAPDNDTACVACRHYYYAGVCVPACPPNTYRFEGWRCVDRDFCANILSAESSDSEGFVIHDGECMQECPSGFIRNGSQSMYCIPCEGPCPKVCEEEKKTKTIDSVTSAQMLQGCTIFKGNLLINIRRGNNIASELENFMGLIEVVTGYVKIRHSHALVSLSFLKNLRLILGEEQLEGNYSFYVLDNQNLQQLWDWDHRNLTIKAGKMYFAFNPKLCVSEIYRMEEVTGTKGRQSKGDINTRNNGERASGGGGSGGGGSGGNGSGGGGSGPETLCGAELVDALQFVCGDRGFYFNKPTGYGSSSRRAPQTGIVDECCFRSCDLRRLEMYCAPLKPAKSA

SEQ ID NO: 178 - protein, 224 aa, Artificial
  synthesized IGF1 fusion protein
MGKISSLPTQLFKCCFCDFLKGPETLCGAELVDALQFVCGDRGFYFNKPTGYGSSSRRAPQTGIVDECCFRSCDLRRLEMYCAPLKPAKSAGGGGSGGGGSGGNGSGGGGSHFTSTTTSKNRIIITWHRYRPPDYRDLISFTVYYKEAPFKNVTEYDGQDACGSNSWNMVDVDLPPNKDVEPGILLHGLKPWTQYAVYVKAVTLTMVENDHIRGAKSEILYIRT

SEQ ID NO: 179 - protein, 233 aa, Artificial
  synthesized IGF1 fusion protein
MKSGSGGGSPTSLWGLLFLSAALSLWPTSGHFTSTTTSKNRIIITWHRYRPPDYRDLISFTVYYKEAPFKNVTEYDGQDACGSNSWNMVDVDLPPNKDVEPGILLHGLKPWTQYAVYVKAVTLTMVENDHIRGAKSEILYIRTGGGGSGGGGSGGNGSGGGGSGPETLCGAELVDALQFVCGDRGFYFNKPTGYGSSSRRAPQTGIVDECCFRSCDLRRLEMYCAPLKPAKSA

SEQ ID NO: 180 - protein, 260 aa, Artificial
  synthesized IGF1 fusion protein
MGKISSLPTQLFKCCFCDFLKGPETLCGAELVDALQFVCGDRGFYFNKPTGYGSSSRRAPQTGIVDECCFRSCDLRRLEMYCAPLKPAKSAGGGGSGGGGSGGNGTGGGGSEICGPGIDIRNDYQQLKRLENCTVIEGYLHILLISKAEDYRSYRFPKLTVITEYLLLFRVAGLESLGDLFPNLTVIRGWKLFYNYALVIFEMTNLKDIGLYNLRNITRGAIRIEKNADLCYLSTVDWSLILDAVSNNYIVGNKPPKECG

SEQ ID NO: 181 - protein, 269 aa, Artificial
  synthesized IGF1 fusion protein
MKSGSGGGSPTSLWGLLFLSAALSLWPTSGEICGPGIDIRNDYQQLKRLENCTVIEGYLHILLISKAEDYRSYRFPKLTVITEYLLLFRVAGLESLGDLFPNLTVIRGWKLFYNYALVIFEMTNLKDIGLYNLRNITRGAIRIEKNADLCYLSTVDWSLILDAVSNNYIVGNKPPKECGGGGGSGGGGSGGNGTGGGGSGPETLCGAELVDALQFVCGDRGFYFNKPTGYGSSSRRAPQTGIVDECCFRSCDLRRLEMYCAPLKPAKSA

SEQ ID NO: 182 - protein, 370 aa, Artificial
  synthesized IGF1 fusion protein
MGKISSLPTQLFKCCFCDFLKGPETLCGAELVDALQFVCGDRGFYFNKPTGYGSSSRRAPQTGIVDECCFRSCDLRRLEMYCAPLKPAKSAGGGGSGGGGSGGNGTGGGGSECCHPECLGSCSAPDNDTACVACRHYYYAGVCVPACPPNTYRFEGWRCVDRDFCANILSAESSDSEGFVIHDGECMQECPSGFIRNGSQSMYCIPCEGPCPKVCEEEKKTKTIDSVTSAQMLQGCTIFKGNLLINIRRGNNIASELENFMGLIEVVTGYVKIRHSHALVSLSFLKNLRLILGEEQLEGNYSFYVLDNQNLQQLWDWDHRNLTIKAGKMYFAFNPKLCVSEIYRMEEVTGTKGRQSKGDINTRNNGERAS

SEQ ID NO: 183 - protein, 379 aa, Artificial
  synthesized IGF1 fusion protein
MKSGSGGGSPTSLWGLLFLSAALSLWPTSGECCHPECLGSCSAPDNDTACVACRHYYYAGVCVPACPPNTYRFEGWRCVDRDFCANILSAESSDSEGFVIHDGECMQECPSGFIRNGSQSMYCIPCEGPCPKVCEEEKKTKTIDSVTSAQMLQGCTIFKGNLLINIRRGNNIASELENFMGLIEVVTGYVKIRHSHALVSLSFLKNLRLILGEEQLEGNYSFYVLDNQNLQQLWDWDHRNLTIKAGKMYFAFNPKLCVSEIYRMEEVTGTKGRQSKGDINTRNNGERASGGGGSGGGGSGGNGTGGGGSGPETLCGAELVDALQFVCGDRGFYFNKPTGYGSSSRRAPQTGIVDECCFRSCDLRRLEMYCAPLKPAKSA

SEQ ID NO: 184 - protein, 224 aa, Artificial
  synthesized IGF1 fusion protein
MGKISSLPTQLFKCCFCDFLKGPETLCGAELVDALQFVCGDRGFYFNKPTGYGSSSRRAPQTGIVDECCFRSCDLRRLEMYCAPLKPAKSAGGGGSGGGGSGGNGTGGGGSHFTSTTTSKNRIIITWHRYRPPDYRDLISFTVYYKEAPFKNVTEYDGQDACGSNSWNMVDVDLPPNKDVEPGILLHGLKPWTQYAVYVKAVTLTMVENDHIRGAKSEILYIRT

SEQ ID NO: 185 - protein, 233 aa, Artificial
  synthesized IGF1 fusion protein
MKSGSGGGSPTSLWGLLFLSAALSLWPTSGHFTSTTTSKNRIIITWHRYRPPDYRDLISFTVYYKEAPFKNVTEYDGQDACGSNSWNMVDVDLPPNKDVEPGILLHGLKPWTQYAVYVKAVTLTMVENDHIRGAKSEILYIRTGGGGSGGGGSGGNGTGGGGSGPETLCGAELVDALQFVCGDRGFYFNKPTGYGSSSRRAPQTGIVDECCFRSCDLRRLEMYCAPLKPAKSA

SEQ ID NO: 186 - protein, 260 aa, Artificial
  synthesized IGF1 fusion protein
MGKISSLPTQLFKCCFCDFLKGPETLCGAELVDALQFVCGDRGFYFNKPTGYGSSSRRAPQTGIVDECCFRSCDLRRLEMYCAPLKPAKSAGGGGSGGGGSGWNGSGGGGSEICGPGIDIRNDYQQLKRLENCTVIEGYLHILLISKAEDYRSYRFPKLTVITEYLLLFRVAGLESLGDLFPNLTVIRGWKLFYNYALVIFEMTNLKDIGLYNLRNITRGAIRIEKNADLCYLSTVDWSLILDAVSNNYIVGNKPPKECG

SEQ ID NO: 187 - protein, 269 aa, Artificial
  synthesized IGF1 fusion protein
MKSGSGGGSPTSLWGLLFLSAALSLWPTSGEICGPGIDIRNDYQQLKRLENCTVIEGYLHILLISKAEDYRSYRFPKLTVITEYLLLFRVAGLESLGDLFPNLTVIRGWKLFYNYALVIFEMTNLKDIGLYNLRNITRGAIRIEKNADLCYLSTVDWSLILDAVSNNYIVGNKPPKECGGGGGSGGGGSGWNGSGGGGSGPETLCGAELVDALQFVCGDRGFYFNKPTGYGSSSRRAPQTGIVDECCFRSCDLRRLEMYCAPLKPAKSA

SEQ ID NO: 188 - protein, 370 aa, Artificial
  synthesized IGF1 fusion protein
MGKISSLPTQLFKCCFCDFLKGPETLCGAELVDALQFVCGDRGFYFNKPTGYGSSSRRAPQTGIVDECCFRSCDLRRLEMYCAPLKPAKSAGGGGSGGGGSGWNGSGGGGSECCHPECLGSCSAPDNDTACVACRHYYYAGVCVPACPPNTYRFEGWRCVDRDFCANILSAESSDSEGFVIHDGECMQECPSGFIRNGSQSMYCIPCEGPCPKVCEEEKKTKTIDSVTSAQMLQGCTIFKGNLLINIRRGNNIASELENFMGLIEVVTGYVKIRHSHALVSLSFLKNLRLILGEEQLEGNYSFYVLDNQNLQQLWDWDHRNLTIKAGKMYFAFNPKLCVSEIYRMEEVTGTKGRQSKGDINTRNNGERAS

SEQ ID NO: 189 - protein, 379 aa, Artificial
  synthesized IGF1 fusion protein
MKSGSGGGSPTSLWGLLFLSAALSLWPTSGECCHPECLGSCSAPDNDTACVACRHYYYAGVCVPACPPNTYRFEGWRCVDRDFCANILSAESSDSEGFVIHDGECMQECPSGFIRNGSQSMYCIPCEGPCPKVCEEEKKTKTIDSVTSAQMLQGCTIFKGNLLINIRRGNNIASELENFMGLIEVVTGYVKIRHSHALVSLSFLKNLRLILGEEQLEGNYSFYVLDNQNLQQLWDWDHRNLTIKAGKMYFAFNPKLCVSEIYRMEEVTGTKGRQSKGDINTRNNGERASGGGGSGGGGSGWNGSGGGGSGPETLCGAELVDALQFVCGDRGFYFNKPTGYGSSSRRAPQTGIVDECCFRSCDLRRLEMYCAPLKPAKSA

SEQ ID NO: 190 - protein, 224 aa, Artificial
  synthesized IGF1 fusion protein
MGKISSLPTQLFKCCFCDFLKGPETLCGAELVDALQFVCGDRGFYFNKPTGYGSSSRRAPQTGIVDECCFRSCDLRRLEMYCAPLKPAKSAGGGGSGGGGSGWNGSGGGGSHFTSTTTSKNRIIITWHRYRPPDYRDLISFTVYYKEAPFKNVTEYDGQDACGSNSWNMVDVDLPPNKDVEPGILLHGLKPWTQYAVYVKAVTLTMVENDHIRGAKSEILYIRT

SEQ ID NO: 191 - protein, 233 aa, Artificial
  synthesized IGF1 fusion  protein
MKSGSGGGSPTSLWGLLFLSAALSLWPTSGHFTSTTTSKNRIIITWHRYRPPDYRDLISFTVYYKEAPFKNVTEYDGQDACGSNSWNMVDVDLPPNKDVEPGILLHGLKPWTQYAVYVKAVTLTMVENDHIRGAKSEILYIRTGGGGSGGGGSGWNGSGGGGSGPETLCGAELVDALQFVCGDRGFYFNKPTGYGSSSRRAPQTGIVDECCFRSCDLRRLEMYCAPLKPAKSA

SEQ ID NO: 192 - protein, 263 aa, Artificial
  synthesized IGF1 fusion protein
MGKISSLPTQLFKCCFCDFLKGPETLCGAELVDALQFVCGDRGFYFNKPTGYGSSSRRAPQTGIVDECCFRSCDLRRLEMYCAPLKPAKSAGGGGSGGGGSGGGGSNATGGGGSEICGPGIDIRNDYQQLKRLENCTVIEGYLHILLISKAEDYRSYRFPKLTVITEYLLLFRVAGLESLGDLFPNLTVIRGWKLFYNYALVIFEMTNLKDIGLYNLRNITRGAIRIEKNADLCYLSTVDWSLILDAVSNNYIVGNKPPKECG

SEQ ID NO: 193 - protein, 272 aa, Artificial
  synthesized IGF1 fusion protein
MKSGSGGGSPTSLWGLLFLSAALSLWPTSGEICGPGIDIRNDYQQLKRLENCTVIEGYLHILLISKAEDYRSYRFPKLTVITEYLLLFRVAGLESLGDLFPNLTVIRGWKLFYNYALVIFEMTNLKDIGLYNLRNITRGAIRIEKNADLCYLSTVDWSLILDAVSNNYIVGNKPPKECGGGGGSGGGGSGGGGSNATGGGGSGPETLCGAELVDALQFVCGDRGFYFNKPTGYGSSSRRAPQTGIVDECCFRSCDLRRLEMYCAPLKPAKSA

SEQ ID NO: 194 - protein, 373 aa, Artificial
  synthesized IGF1 fusion protein
MGKISSLPTQLFKCCFCDFLKGPETLCGAELVDALQFVCGDRGFYFNKPTGYGSSSRRAPQTGIVDECCFRSCDLRRLEMYCAPLKPAKSAGGGGSGGGGSGGGGSNATGGGGSECCHPECLGSCSAPDNDTACVACRHYYYAGVCVPACPPNTYRFEGWRCVDRDFCANILSAESSDSEGFVIHDGECMQECPSGFIRNGSQSMYCIPCEGPCPKVCEEEKKTKTIDSVTSAQMLQGCTIFKGNLLINIRRGNNIASELENFMGLIEVVTGYVKIRHSHALVSLSFLKNLRLILGEEQLEGNYSFYVLDNQNLQQLWDWDHRNLTIKAGKMYFAFNPKLCVSEIYRMEEVTGTKGRQSKGDINTRNNGERAS

SEQ ID NO: 195 - protein, 382 aa, Artificial
  synthesized IGF1 fusion protein
MKSGSGGGSPTSLWGLLFLSAALSLWPTSGECCHPECLGSCSAPDNDTACVACRHYYYAGVCVPACPPNTYRFEGWRCVDRDFCANILSAESSDSEGFVIHDGECMQECPSGFIRNGSQSMYCIPCEGPCPKVCEEEKKTKTIDSVTSAQMLQGCTIFKGNLLINIRRGNNIASELENFMGLIEVVTGYVKIRHSHALVSLSFLKNLRLILGEEQLEGNYSFYVLDNQNLQQLWDWDHRNLTIKAGKMYFAFNPKLCVSEIYRMEEVTGTKGRQSKGDINTRNNGERASGGGGSGGGGSGGGGSNATGGGGSGPETLCGAELVDALQFVCGDRGFYFNKPTGYGSSSRRAPQTGIVDECCFRSCDLRRLEMYCAPLKPAKSA

SEQ ID NO: 196 - protein, 227 aa, Artificial
  synthesized IGF1 fusion protein
MGKISSLPTQLFKCCFCDFLKGPETLCGAELVDALQFVCGDRGFYFNKPTGYGSSSRRAPQTGIVDECCFRSCDLRRLEMYCAPLKPAKSAGGGGSGGGGSGGGGSNATGGGGSHFTSTTTSKNRIIITWHRYRPPDYRDLISFTVYYKEAPFKNVTEYDGQDACGSNSWNMVDVDLPPNKDVEPGILLHGLKPWTQYAVYVKAVTLTMVENDHIRGAKSEILYIRT

SEQ ID NO: 197 - protein, 236 aa, Artificial
  synthesized IGF1 fusion protein
MKSGSGGGSPTSLWGLLFLSAALSLWPTSGHFTSTTTSKNRIIITWHRYRPPDYRDLISFTVYYKEAPFKNVTEYDGQDACGSNSWNMVDVDLPPNKDVEPGILLHGLKPWTQYAVYVKAVTLTMVENDHIRGAKSEILYIRTGGGGSGGGGSGGGGSNATGGGGSGPETLCGAELVDALQFVCGDRGFYFNKPTGYGSSSRRAPQTGIVDECCFRSCDLRRLEMYCAPLKPAKSA

SEQ ID NO: 198 - protein, 347 aa, Artificial
  synthesized IL2 fusion protein
MYRMQLLSCIALSLALVTNSAPTSSSTKKTQLQLEHLLLDLQMILNGINNYKNPKLTRMLTFKFYMPKKATELKHLQCLEEELKPLEEVLNLAQSKNFHLRPRDLISNINVIVLELKGSETTFMCEYADETATIVEFLNRWITFCQSIISTLTGGGGSGGGGSGGGGSGGNGSGGGGSGGGGSELCDDDPPEIPHATFKAMAYKEGTMLNCECKRGFRRIKSGSLYMLCTGNSSHSSWDNQCQCTSSATRNTTKQVTPQPEEQKERKTTEMQSPMQPVDQASLPGHCREPPPWENEATERIYHFVVGQMVYYQCVQGYRALHRGPAESVCKMTHGKTRWTQPQLICT

SEQ ID NO: 199 - protein, 402 aa, Artificial
  synthesized IL2 fusion protein
MYRMQLLSCIALSLALVTNSAPTSSSTKKTQLQLEHLLLDLQMILNGINNYKNPKLTRMLTFKFYMPKKATELKHLQCLEEELKPLEEVLNLAQSKNFHLRPRDLISNINVIVLELKGSETTFMCEYADETATIVEFLNRWITFCQSIISTLTGGGGSGGGGSGGGGSGGNGSGGGGSGGGGSELCDDDPPEIPHATFKAMAYKEGTMLNCECKRGFRRIKSGSLYMLCTGNSSHSSWDNQCQCTSSATRNTTKQVTPQPEEQKERKTTEMQSPMQPVDQASLPGHCREPPPWENEATERIYHFVVGQMVYYQCVQGYRALHRGPAESVCKMTHGKTRWTQPQLICTGEMETSQFPGEEKPQASPEGRPESETSCLVTTTDFQIQTEMAATMETSIFTTEYQ

SEQ ID NO: 200 - protein, 353 aa, Artificial
  synthesized IL2 fusion  protein
MDSYLLMWGLLTFIMVPGCQAELCDDDPPEIPHATFKAMAYKEGTMLNCECKRGFRRIKSGSLYMLCTGNSSHSSWDNQCQCTSSATRNTTKQVTPQPEEQKERKTTEMQSPMQPVDQASLPGHCREPPPWENEATERIYHFVVGQMVYYQCVQGYRALHRGPAESVCKMTHGKTRWTQPQLICTGGGGSGGGGSGGGGSGGGGSGGNGSGGGGSGGGGSAPTSSSTKKTQLQLEHLLLDLQMILNGINNYKNPKLTRMLTFKFYMPKKATELKHLQCLEEELKPLEEVLNLAQSKNFHLRPRDLISNINVIVLELKGSETTFMCEYADETATIVEFLNRWITFCQSIISTLT

SEQ ID NO: 201 - protein, 408 aa, Artificial
  synthesized IL2 fusion protein
MDSYLLMWGLLTFIMVPGCQAELCDDDPPEIPHATFKAMAYKEGTMLNCECKRGFRRIKSGSLYMLCTGNSSHSSWDNQCQCTSSATRNTTKQVTPQPEEQKERKTTEMQSPMQPVDQASLPGHCREPPPWENEATERIYHFVVGQMVYYQCVQGYRALHRGPAESVCKMTHGKTRWTQPQLICTGEMETSQFPGEEKPQASPEGRPESETSCLVTTTDFQIQTEMAATMETSIFTTEYQGGGGSGGGGSGGGGSGGGGSGGNGSGGGGSGGGGSAPTSSSTKKTQLQLEHLLLDLQMILNGINNYKNPKLTRMLTFKFYMPKKATELKHLQCLEEELKPLEEVLNLAQSKNFHLRPRDLISNINVIVLELKGSETTFMCEYADETATIVEFLNRWITFCQSIISTLT

SEQ ID NO: 202 - protein, 382 aa, Artificial [sequence omitted]

SEQ ID NO: 203 - protein, 387 aa, Artificial [sequence omitted]

SEQ ID NO: 204 - protein, 410 aa, Artificial [sequence omitted]

SEQ ID NO: 205 - protein, 416 aa, Artificial
  synthesized IL2 fusion protein
MFHVSFRYIFGLPPLILVLLPVASSDCDIEGKDGKQYESVLMVSIDQLLDSMKEIGSNCLNNEFNFFKRHICDANKEGMFLFRAARKLRQFLKMNSTGDFDLHLLKVSEGTTILLNCTGQVKGRKPAALGEAQPTKSLEENKSLKEQKKLNDLCFLKRLLQEIKTCWNKILMGTKEHGGGGSGGNGSGGGGSGGGGSESGYAQNGDLEDAELDDYSFSCYSQLEVNGSQHSLTCAFEDPDVNTTNLEFEICGALVEVKCLNFRKLQEIYFIETKKFLLIGKSNICVKVGEKSLTCKKIDLTTIVKPEAPFDLSVIYREGANDFVVTFNTSHLQKKYVKVLMHDVAYRQEKDENKWTHVNLSSTKLTLLQRKLQPAAMYEIKVRSIPDHYFKGFWSEWSPSYYFRTPEINNSSGEMD

SEQ ID NO: 206 - protein, 442 aa, Artificial
  synthesized IL2 fusion protein
MFHVSFRYIFGLPPLILVLLPVASSDCDIEGKDGKQYESVLMVSIDQLLDSMKEIGSNCLNNEFNFFKRHICDANKEGMFLFRAARKLRQFLKMNSTGDFDLHLLKVSEGTTILLNCTGQVKGRKPAALGEAQPTKSLEENKSLKEQKKLNDLCFLKRLLQEIKTCWNKILMGTKEHGGGGSGGGGSGGNGSGGGGSGGGGSLNTTILTPNGNEDTTADFFLTTMPTDSLSVSTLPLPEVQCFVFNVEYMNCTWNSSSEPQPTNLTLHYWYKNSDNDKVQKCSHYLFSEEITSGCQLQKKEIHLYQTFVVQLQDPREPRRQATQMLKLQNLVIPWAPENLTLHKLSESQLELNWNNRFLNHCLEHLVQYRTDWDHSWTEQSVDYRHKFSLPSVDGQKRYTFRVRSRFNPLCGSAQHWSEWSHPIHWGSNTSKENPFLFALEA

SEQ ID NO: 207 - protein, 411 aa, Artificial
  synthesized IL2 fusion protein
MTILGTTFGMVFSLLQVVSGESGYAQNGDLEDAELDDYSFSCYSQLEVNGSQHSLTCAFEDPDVNTTNLEFEICGALVEVKCLNFRKLQEIYFIETKKFLLIGKSNICVKVGEKSLTCKKIDLTTIVKPEAPFDLSVIYREGANDFVVTFNTSHLQKKYVKVLMHDVAYRQEKDENKWTHVNLSSTKLTLLQRKLQPAAMYEIKVRSIPDHYFKGFWSEWSPSYYFRTPEINNSSGEMDGGGGSGGNGSGGGGSGGGGSDCDIEGKDGKQYESVLMVSIDQLLDSMKEIGSNCLNNEFNFFKRHICDANKEGMFLFRAARKLRQFLKMNSTGDFDLHLLKVSEGTTILLNCTGQVKGRKPAALGEAQPTKSLEENKSLKEQKKLNDLCFLKRLLQEIKTCWNKILMGTKEH

SEQ ID NO: 208 - protein, 439 aa, Artificial
  synthesized IL2 fusion protein
MLKPSLPFTSLLFLQLPLLGVGLNTTILTPNGNEDTTADFFLTTMPTDSLSVSTLPLPEVQCFVFNVEYMNCTWNSSSEPQPTNLTLHYWYKNSDNDKVQKCSHYLFSEEITSGCQLQKKEIHLYQTFVVQLQDPREPRRQATQMLKLQNLVIPWAPENLTLHKLSESQLELNWNNRFLNHCLEHLVQYRTDWDHSWTEQSVDYRHKFSLPSVDGQKRYTFRVRSRFNPLCGSAQHWSEWSHPIHWGSNTSKENPFLFALEAGGGGSGGGGSGGNGSGGGGSGGGGSDCDIEGKDGKQYESVLMVSIDQLLDSMKEIGSNCLNNEFNFFKRHICDANKEGMFLFRAARKLRQFLKMNSTGDFDLHLLKVSEGTTILLNCTGQVKGRKPAALGEAQPTKSLEENKSLKEQKKLNDLCFLKRLLQEIKTCWNKILMGTKEH

SEQ ID NO: 209 - protein, 391 aa, Artificial
  synthesized IL2 fusion protein
DCDIEGKDGKQYESVLMVSIDQLLDSMKEIGSNCLNNEFNFFKRHICDANKEGMFLFRAARKLRQFLKMNSTGDFDLHLLKVSEGTTILLNCTGQVKGRKPAALGEAQPTKSLEENKSLKEQKKLNDLCFLKRLLQEIKTCWNKILMGTKEHGGGGSGGNGSGGGGSGGGGSESGYAQNGDLEDAELDDYSFSCYSQLEVNGSQHSLTCAFEDPDVNTTNLEFEICGALVEVKCLNFRKLQEIYFIETKKFLLIGKSNICVKVGEKSLTCKKIDLTTIVKPEAPFDLSVIYREGANDFVVTFNTSHLQKKYVKVLMHDVAYRQEKDENKWTHVNLSSTKLTLLQRKLQPAAMYEIKVRSIPDHYFKGFWSEWSPSYYFRTPEINNSSGEMD

SEQ ID NO: 210 - protein, 417 aa, Artificial
  synthesized IL2 fusion protein
DCDIEGKDGKQYESVLMVSIDQLLDSMKEIGSNCLNNEFNFFKRHICDANKEGMFLFRAARKLRQFLKMNSTGDFDLHLLKVSEGTTILLNCTGQVKGRKPAALGEAQPTKSLEENKSLKEQKKLNDLCFLKRLLQEIKTCWNKILMGTKEHGGGGSGGGGSGGNGSGGGGSGGGGSLNTTILTPNGNEDTTADFFLTTMPTDSLSVSTLPLPEVQCFVFNVEYMNCTWNSSSEPQPTNLTLHYWYKNSDNDKVQKCSHYLFSEEITSGCQLQKKEIHLYQTFVVQLQDPREPRRQATQMLKLQNLVIPWAPENLTLHKLSESQLELNWNNRFLNHCLEHLVQYRTDWDHSWTEQSVDYRHKFSLPSVDGQKRYTFRVRSRFNPLCGSAQHWSEWSHPIHWGSNTSKENPFLFALEA

SEQ ID NO: 211 - protein, 391 aa, Artificial
  synthesized IL2 fusion protein
ESGYAQNGDLEDAELDDYSFSCYSQLEVNGSQHSLTCAFEDPDVNTTNLEFEICGALVEVKCLNFRKLQEIYFIETKKFLLIGKSNICVKVGEKSLTCKKIDLTTIVKPEAPFDLSVIYREGANDFVVTFNTSHLQKKYVKVLMHDVAYRQEKDENKWTHVNLSSTKLTLLQRKLQPAAMYEIKVRSIPDHYFKGFWSEWSPSYYFRTPEINNSSGEMDGGGGSGGNGSGGGGSGGGGSDCDIEGKDGKQYESVLMVSIDQLLDSMKEIGSNCLNNEFNFFKRHICDANKEGMFLFRAARKLRQFLKMNSTGDFDLHLLKVSEGTTILLNCTGQVKGRKPAALGEAQPTKSLEENKSLKEQKKLNDLCFLKRLLQEIKTCWNKILMGTKEH

SEQ ID NO: 212 - protein, 417 aa, Artificial
  synthesized IL2 fusion protein
LNTTILTPNGNEDTTADFFLTTMPTDSLSVSTLPLPEVQCFVFNVEYMNCTWNSSSEPQPTNLTLHYWYKNSDNDKVQKCSHYLFSEEITSGCQLQKKEIHLYQTFVVQLQDPREPRRQATQMLKLQNLVIPWAPENLTLHKLSESQLELNWNNRFLNHCLEHLVQYRTDWDHSWTEQSVDYRHKFSLPSVDGQKRYTFRVRSRFNPLCGSAQHWSEWSHPIHWGSNTSKENPFLFALEAGGGGSGGGGSGGNGSGGGGSGGGGSDCDIEGKDGKQYESVLMVSIDQLLDSMKEIGSNCLNNEFNFFKRHICDANKEGMFLFRAARKLRQFLKMNSTGDFDLHLLKVSEGTTILLNCTGQVKGRKPAALGEAQPTKSLEENKSLKEQKKLNDLCFLKRLLQEIKTCWNKILMGTKEH

SEQ ID NO: 213 - protein, 430 aa, Artificial
  synthesized IL2 fusion  protein
MALTFALLVALLVLSCKSSCSVGCDLPQTHSLGSRRTLMLLAQMRRISLFSCLKDRHDFGFPQEEFGNQFQKAETIPVLHEMIQQIFNLFSTKDSSAAWDETLLDKFYTELYQQLNDLEACVIQGVGVTETPLMKEDSILAVRKYFQRITLYLKEKKYSPCAWEVVRAEIMRSFSLSTNLQESLRSKEGGGGSGGGGSGGNGSGGGGSGGGGSISYDSPDYTDESCTFKISLRNFRSILSWELKNHSIVPTHYTLLYTIMSKPEDLKVVKNCANTTRSFCDLTDEWRSTHEAYVTVLEGFSGNTTLFSCSHNFWLAIDMSFEPPEFEIVGFTNHINVVVKFPSIVEEELQFDLSLVIEEQSEGIVKKHKPEIKGNMSGNFTYIIDKLIPNTNYCVSVYLEHSDEQAVIKSPLKCTLLPPGQESESAESAK

SEQ ID NO: 214 - protein, 347 aa, Artificial
  synthesized IL2 fusion protein
MYRMQLLSCIALSLALVTNSAPTSSSTKKTQLQLEHLLLDLQMILNGINNYKNPKLTRMLTFKFYMPKKATELKHLQCLEEELKPLEEVLNLAQSKNFHLRPRDLISNINVIVLELKGSETTFMCEYADETATIVEFLNRWITFCQSIISTLTGGGGSGGGGSGGGGSGGNGTGGGGSGGGGSELCDDDPPEIPHATFKAMAYKEGTMLNCECKRGFRRIKSGSLYMLCTGNSSHSSWDNQCQCTSSATRNTTKQVTPQPEEQKERKTTEMQSPMQPVDQASLPGHCREPPPWENEATERIYHFVVGQMVYYQCVQGYRALHRGPAESVCKMTHGKTRWTQPQLICT

SEQ ID NO: 215 - protein, 402 aa, Artificial
  synthesized IL2 fusion protein
MYRMQLLSCIALSLALVTNSAPTSSSTKKTQLQLEHLLLDLQMILNGINNYKNPKLTRMLTFKFYMPKKATELKHLQCLEEELKPLEEVLNLAQSKNFHLRPRDLISNINVIVLELKGSETTFMCEYADETATIVEFLNRWITFCQSIISTLTGGGGSGGGGSGGGGSGGNGTGGGGSGGGGSELCDDDPPEIPHATFKAMAYKEGTMLNCECKRGFRRIKSGSLYMLCTGNSSHSSWDNQCQCTSSATRNTTKQVTPQPEEQKERKTTEMQSPMQPVDQASLPGHCREPPPWENEATERIYHFVVGQMVYYQCVQGYRALHRGPAESVCKMTHGKTRWTQPQLICTGEMETSQFPGEEKPQASPEGRPESETSCLVTTTDFQIQTEMAATMETSIFTTEYQ

SEQ ID NO: 216 - protein, 353 aa, Artificial
  synthesized IL2 fusion protein
MDSYLLMWGLLTFIMVPGCQAELCDDDPPEIPHATFKAMAYKEGTMLNCECKRGFRRIKSGSLYMLCTGNSSHSSWDNQCQCTSSATRNTTKQVTPQPEEQKERKTTEMQSPMQPVDQASLPGHCREPPPWENEATERIYHFVVGQMVYYQCVQGYRALHRGPAESVCKMTHGKTRWTQPQLICTGGGGSGGGGSGGGGSGGGGSGGNGTGGGGSGGGGSAPTSSSTKKTQLQLEHLLLDLQMILNGINNYKNPKLTRMLTFKFYMPKKATELKHLQCLEEELKPLEEVLNLAQSKNFHLRPRDLISNINVIVLELKGSETTFMCEYADETATIVEFLNRWITFCQSIISTLT

SEQ ID NO: 217 - protein, 408 aa, Artificial
  synthesized IL2 fusion protein
MDSYLLMWGLLTFIMVPGCQAELCDDDPPEIPHATFKAMAYKEGTMLNCECKRGFRRIKSGSLYMLCTGNSSHSSWDNQCQCTSSATRNTTKQVTPQPEEQKERKTTEMQSPMQPVDQASLPGHCREPPPWENEATERIYHFVVGQMVYYQCVQGYRALHRGPAESVCKMTHGKTRWTQPQLICTGEMETSQFPGEEKPQASPEGRPESETSCLVTTTDFQIQTEMAATMETSIFTTEYQGGGGSGGGGSGGGGSGGGGSGGNGTGGGGSGGGGSAPTSSSTKKTQLQLEHLLLDLQMILNGINNYKNPKLTRMLTFKFYMPKKATELKHLQCLEEELKPLEEVLNLAQSKNFHLRPRDLISNINVIVLELKGSETTFMCEYADETATIVEFLNRWITFCQSIISTLT

SEQ ID NO: 218 - protein, 382 aa, Artificial [sequence omitted]

SEQ ID NO: 219 - protein, 387 aa, Artificial
  synthesized IL2 fusion protein
MYRMQLLSCIALSLALVTNSAPTSSSTKKTQLQLEHLLLDLQMILNGINNYKNPKLTRMLTFKFYMPKKATELKHLQCLEEELKPLEEVLNLAQSKNFHLRPRDLISNINVIVLELKGSETTFMCEYADETATIVEFLNRWITFCQSIISTLTGGGGSGGNGTGGGGSGGGGSAVNGTSQFTCFYNSRANISCVWSQDGALQDTSCQVHAWPDRRRWNQTCELLPVSQASWACNLILGAPDSQKLTTVDIVTLRVLCREGVRWRVMAIQDFKPFENLRLMAPISLQVVHVETHRCNISWEISQASHYFERHLEFEARTLSPGHTWEEAPLLTLKQKQEWICLETLTPDTQYEFQVRVKPLQGEFTTWSPWSQPLAFRTKPAALGKDT

SEQ ID NO: 220 - protein, 410 aa, Artificial
  synthesized IL2 fusion protein
MYRMQLLSCIALSLALVTNSAPTSSSTKKTQLQLEHLLLDLQMILNGINNYKNPKLTRMLTFKFYMPKKATELKHLQCLEEELKPLEEVLNLAQSKNFHLRPRDLISNINVIVLELKGSETTFMCEYADETATIVEFLNRWITFCQSIISTLTGGGGSGGGGSGGNGTGGGGSGGGGSLNTTILTPNGNEDTTADFFLTTMPTDSLSVSTLPLPEVQCFVFNVEYMNCTWNSSSEPQPTNLTLHYWYKNSDNDKVQKCSHYLFSEEITSGCQLQKKEIHLYQTFVVQLQDPREPRRQATQMLKLQNLVIPWAPENLTLHKLSESQLELNWNNRFLNHCLEHLVQYRTDWDHSWTEQSVDYRHKFSLPSVDGQKRYTFRVRSRFNPLCGSAQHWSEWSHPIHWGSNTSKEN

SEQ ID NO: 221 - protein, 416 aa, Artificial
  synthesized IL2 fusion protein
MFHVSFRYIFGLPPLILVLLPVASSDCDIEGKDGKQYESVLMVSIDQLLDSMKEIGSNCLNNEFNFFKRHICDANKEGMFLFRAARKLRQFLKMNSTGDFDLHLLKVSEGTTILLNCTGQVKGRKPAALGEAQPTKSLEENKSLKEQKKLNDLCFLKRLLQEIKTCWNKILMGTKEHGGGGSGGNGTGGGGSGGGGSESGYAQNGDLEDAELDDYSFSCYSQLEVNGSQHSLTCAFEDPDVNTTNLEFEICGALVEVKCLNFRKLQEIYFIETKKFLLIGKSNICVKVGEKSLTCKKIDLTTIVKPEAPFDLSVIYREGANDFVVTFNTSHLQKKYVKVLMHDVAYRQEKDENKWTHVNLSSTKLTLLQRKLQPAAMYEIKVRSIPDHYFKGFWSEWSPSYYFRTPEINNSSGEMD

SEQ ID NO: 222 - protein, 442 aa, Artificial
  synthesized IL2 fusion protein
MFHVSFRYIFGLPPLILVLLPVASSDCDIEGKDGKQYESVLMVSIDQLLDSMKEIGSNCLNNEFNFFKRHICDANKEGMFLFRAARKLRQFLKMNSTGDFDLHLLKVSEGTTILLNCTGQVKGRKPAALGEAQPTKSLEENKSLKEQKKLNDLCFLKRLLQEIKTCWNKILMGTKEHGGGGSGGGGSGGNGTGGGGSGGGGSLNTTILTPNGNEDTTADFFLTTMPTDSLSVSTLPLPEVQCFVFNVEYMNCTWNSSSEPQPTNLTLHYWYKNSDNDKVQKCSHYLFSEEITSGCQLQKKEIHLYQTFVVQLQDPREPRRQATQMLKLQNLVIPWAPENLTLHKLSESQLELNWNNRFLNHCLEHLVQYRTDWDHSWTEQSVDYRHKFSLPSVDGQKRYTFRVRSRFNPLCGSAQHWSEWSHPIHWGSNTSKENPFLFALEA

SEQ ID NO: 223 - protein, 411 aa, Artificial
  synthesized IL2 fusion protein
MTILGTTFGMVFSLLQVVSGESGYAQNGDLEDAELDDYSFSCYSQLEVNGSQHSLTCAFEDPDVNTTNLEFEICGALVEVKCLNFRKLQEIYFIETKKFLLIGKSNICVKVGEKSLTCKKIDLTTIVKPEAPFDLSVIYREGANDFVVTFNTSHLQKKYVKVLMHDVAYRQEKDENKWTHVNLSSTKLTLLQRKLQPAAMYEIKVRSIPDHYFKGFWSEWSPSYYFRTPEINNSSGEMDGGGGSGGNGTGGGGSGGGGSDCDIEGKDGKQYESVLMVSIDQLLDSMKEIGSNCLNNEFNFFKRHICDANKEGMFLFRAARKLRQFLKMNSTGDFDLHLLKVSEGTTILLNCTGQVKGRKPAALGEAQPTKSLEENKSLKEQKKLNDLCFLKRLLQEIKTCWNKILMGTKEH

SEQ ID NO: 224 - protein, 439 aa, Artificial
  synthesized IL2 fusion protein
MLKPSLPFTSLLFLQLPLLGVGLNTTILTPNGNEDTTADFFLTTMPTDSLSVSTLPLPEVQCFVFNVEYMNCTWNSSSEPQPTNLTLHYWYKNSDNDKVQKCSHYLFSEEITSGCQLQKKEIHLYQTFVVQLQDPREPRRQATQMLKLQNLVIPWAPENLTLHKLSESQLELNWNNRFLNHCLEHLVQYRTDWDHSWTEQSVDYRHKFSLPSVDGQKRYTFRVRSRFNPLCGSAQHWSEWSHPIHWGSNTSKENPFLFALEAGGGGSGGGGSGGNGTGGGGSGGGGSDCDIEGKDGKQYESVLMVSIDQLLDSMKEIGSNCLNNEFNFFKRHICDANKEGMFLFRAARKLRQFLKMNSTGDFDLHLLKVSEGTTILLNCTGQVKGRKPAALGEAQPTKSLEENKSLKEQKKLNDLCFLKRLLQEIKTCWNKILMGTKEH

SEQ ID NO: 225 - protein, 391 aa, Artificial
  synthesized IL2 fusion protein
DCDIEGKDGKQYESVLMVSIDQLLDSMKEIGSNCLNNEFNFFKRHICDANKEGMFLFRAARKLRQFLKMNSTGDFDLHLLKVSEGTTILLNCTGQVKGRKPAALGEAQPTKSLEENKSLKEQKKLNDLCFLKRLLQEIKTCWNKILMGTKEHGGGGSGGNGTGGGGSGGGGSESGYAQNGDLEDAELDDYSFSCYSQLEVNGSQHSLTCAFEDPDVNTTNLEFEICGALVEVKCLNFRKLQEIYFIETKKFLLIGKSNICVKVGEKSLTCKKIDLTTIVKPEAPFDLSVIYREGANDFVVTFNTSHLQKKYVKVLMHDVAYRQEKDENKWTHVNLSSTKLTLLQRKLQPAAMYEIKVRSIPDHYFKGFWSEWSPSYYFRTPEINNSSGEMD

SEQ ID NO: 226 - protein, 417 aa, Artificial
  synthesized IL2 fusion protein
DCDIEGKDGKQYESVLMVSIDQLLDSMKEIGSNCLNNEFNFFKRHICDANKEGMFLFRAARKLRQFLKMNSTGDFDLHLLKVSEGTTILLNCTGQVKGRKPAALGEAQPTKSLEENKSLKEQKKLNDLCFLKRLLQEIKTCWNKILMGTKEHGGGGSGGGGSGGNGTGGGGSGGGGSLNTTILTPNGNEDTTADFFLTTMPTDSLSVSTLPLPEVQCFVFNVEYMNCTWNSSSEPQPTNLTLHYWYKNSDNDKVQKCSHYLFSEEITSGCQLQKKEIHLYQTFVVQLQDPREPRRQATQMLKLQNLVIPWAPENLTLHKLSESQLELNWNNRFLNHCLEHLVQYRTDWDHSWTEQSVDYRHKFSLPSVDGQKRYTFRVRSRFNPLCGSAQHWSEWSHPIHWGSNTSKENPFLFALEA

SEQ ID NO: 227 - protein, 391 aa, Artificial
  synthesized IL2 fusion protein
ESGYAQNGDLEDAELDDYSFSCYSQLEVNGSQHSLTCAFEDPDVNTTNLEFEICGALVEVKCLNFRKLQEIYFIETKKFLLIGKSNICVKVGEKSLTCKKIDLTTIVKPEAPFDLSVIYREGANDFVVTFNTSHLQKKYVKVLMHDVAYRQEKDENKWTHVNLSSTKLTLLQRKLQPAAMYEIKVRSIPDHYFKGFWSEWSPSYYFRTPEINNSSGEMDGGGGSGGNGTGGGGSGGGGSDCDIEGKDGKQYESVLMVSIDQLLDSMKEIGSNCLNNEFNFFKRHICDANKEGMFLFRAARKLRQFLKMNSTGDFDLHLLKVSEGTTILLNCTGQVKGRKPAALGEAQPTKSLEENKSLKEQKKLNDLCFLKRLLQEIKTCWNKILMGTKEH

SEQ ID NO: 228 - protein, 417 aa, Artificial
  synthesized IL2 fusion protein
LNTTILTPNGNEDTTADFFLTTMPTDSLSVSTLPLPEVQCFVFNVEYMNCTWNSSSEPQPTNLTLHYWYKNSDNDKVQKCSHYLFSEEITSGCQLQKKEIHLYQTFVVQLQDPREPRRQATQMLKLQNLVIPWAPENLTLHKLSESQLELNWNNRFLNHCLEHLVQYRTDWDHSWTEQSVDYRHKFSLPSVDGQKRYTFRVRSRFNPLCGSAQHWSEWSHPIHWGSNTSKENPFLFALEAGGGGSGGGGSGGNGTGGGGSGGGGSDCDIEGKDGKQYESVLMVSIDQLLDSMKEIGSNCLNNEFNFFKRHICDANKEGMFLFRAARKLRQFLKMNSTGDFDLHLLKVSEGTTILLNCTGQVKGRKPAALGEAQPTKSLEENKSLKEQKKLNDLCFLKRLLQEIKTCWNKILMGTKEH

SEQ ID NO: 229 - protein, 430 aa, Artificial
  synthesized IL2 fusion protein
MALTFALLVALLVLSCKSSCSVGCDLPQTHSLGSRRTLMLLAQMRRISLFSCLKDRHDFGFPQEEFGNQFQKAETIPVLHEMIQQIFNLFSTKDSSAAWDETLLDKFYTELYQQLNDLEACVIQGVGVTETPLMKEDSILAVRKYFQRITLYLKEKKYSPCAWEVVRAEIMRSFSLSTNLQESLRSKEGGGGSGGGGSGGNGTGGGGSGGGGSISYDSPDYTDESCTFKISLRNFRSILSWELKNHSIVPTHYTLLYTIMSKPEDLKVVKNCANTTRSFCDLTDEWRSTHEAYVTVLEGFSGNTTLFSCSHNFWLAIDMSFEPPEFEIVGFTNHINVVVKFPSIVEEELQFDLSLVIEEQSEGIVKKHKPEIKGNMSGNFTYIIDKLIPNTNYCVSVYLEHSDEQAVIKSPLKCTLLPPGQESESAESAK

SEQ ID NO: 230 - protein, 347 aa, Artificial
  synthesized IL2 fusion protein
MYRMQLLSCIALSLALVTNSAPTSSSTKKTQLQLEHLLLDLQMILNGINNYKNPKLTRMLTFKFYMPKKATELKHLQCLEEELKPLEEVLNLAQSKNFHLRPRDLISNINVIVLELKGSETTFMCEYADETATIVEFLNRWITFCQSIISTLTGGGGSGGGGSGGGGSGWNGSGGGGSGGGGSELCDDDPPEIPHATFKAMAYKEGTMLNCECKRGFRRIKSGSLYMLCTGNSSHSSWDNQCQCTSSATRNTTKQVTPQPEEQKERKTTEMQSPMQPVDQASLPGHCREPPPWENEATERIYHFVVGQMVYYQCVQGYRALHRGPAESVCKMTHGKTRWTQPQLICT

SEQ ID NO: 231 - protein, 402 aa, Artificial
  synthesized IL2 fusion protein
MYRMQLLSCIALSLALVTNSAPTSSSTKKTQLQLEHLLLDLQMILNGINNYKNPKLTRMLTFKFYMPKKATELKHLQCLEEELKPLEEVLNLAQSKNFHLRPRDLISNINVIVLELKGSETTFMCEYADETATIVEFLNRWITFCQSIISTLTGGGGSGGGGSGGGGSGWNGSGGGGSGGGGSELCDDDPPEIPHATFKAMAYKEGTMLNCECKRGFRRIKSGSLYMLCTGNSSHSSWDNQCQCTSSATRNTTKQVTPQPEEQKERKTTEMQSPMQPVDQASLPGHCREPPPWENEATERIYHFVVGQMVYYQCVQGYRALHRGPAESVCKMTHGKTRWTQPQLICTGEMETSQFPGEEKPQASPEGRPESETSCLVTTTDFQIQTEMAATMETSIFTTEYQ

SEQ ID NO: 232 - protein, 353 aa, Artificial
  synthesized IL2 fusion protein
MDSYLLMWGLLTFIMVPGCQAELCDDDPPEIPHATFKAMAYKEGTMLNCECKRGFRRIKSGSLYMLCTGNSSHSSWDNQCQCTSSATRNTTKQVTPQPEEQKERKTTEMQSPMQPVDQASLPGHCREPPPWENEATERIYHFVVGQMVYYQCVQGYRALHRGPAESVCKMTHGKTRWTQPQLICTGGGGSGGGGSGGGGSGGGGSGWNGSGGGGSGGGGSAPTSSSTKKTQLQLEHLLLDLQMILNGINNYKNPKLTRMLTFKFYMPKKATELKHLQCLEEELKPLEEVLNLAQSKNFHLRPRDLISNINVIVLELKGSETTFMCEYADETATIVEFLNRWITFCQSIISTLT

SEQ ID NO: 233 - protein, 408 aa, Artificial
  synthesized IL2 fusion protein
MDSYLLMWGLLTFIMVPGCQAELCDDDPPEIPHATFKAMAYKEGTMLNCECKRGFRRIKSGSLYMLCTGNSSHSSWDNQCQCTSSATRNTTKQVTPQPEEQKERKTTEMQSPMQPVDQASLPGHCREPPPWENEATERIYHFVVGQMVYYQCVQGYRALHRGPAESVCKMTHGKTRWTQPQLICTGEMETSQFPGEEKPQASPEGRPESETSCLVTTTDFQIQTEMAATMETSIFTTEYQGGGGSGGGGSGGGGSGGGGSGWNGSGGGGSGGGGSAPTSSSTKKTQLQLEHLLLDLQMILNGINNYKNPKLTRMLTFKFYMPKKATELKHLQCLEEELKPLEEVLNLAQSKNFHLRPRDLISNINVIVLELKGSETTFMCEYADETATIVEFLNRWITFCQSIISTLT

SEQ ID NO: 234 - protein, 382 aa, Artificial [sequence omitted]

SEQ ID NO: 235 - protein, 387 aa, Artificial [sequence omitted]

SEQ ID NO: 236 - protein, 410 aa, Artificial [sequence omitted]

SEQ ID NO: 237 - protein, 416 aa, Artificial
  synthesized IL2 fusion protein
MFHVSFRYIFGLPPLILVLLPVASSDCDIEGKDGKQYESVLMVSIDQLLDSMKEIGSNCLNNEFNFFKRHICDANKEGMFLFRAARKLRQFLKMNSTGDFDLHLLKVSEGTTILLNCTGQVKGRKPAALGEAQPTKSLEENKSLKEQKKLNDLCFLKRLLQEIKTCWNKILMGTKEHGGGGSGWNGSGGGGSGGGGSESGYAQNGDLEDAELDDYSFSCYSQLEVNGSQHSLTCAFEDPDVNTTNLEFEICGALVEVKCLNFRKLQEIYFIETKKFLLIGKSNICVKVGEKSLTCKKIDLTTIVKPEAPFDLSVIYREGANDFVVTFNTSHLQKKYVKVLMHDVAYRQEKDENKWTHVNLSSTKLTLLQRKLQPAAMYEIKVRSIPDHYFKGFWSEWSPSYYFRTPEINNSSGEMD

SEQ ID NO: 238 - protein, 442 aa, Artificial
  synthesized IL2 fusion protein
MFHVSFRYIFGLPPLILVLLPVASSDCDIEGKDGKQYESVLMVSIDQLLDSMKEIGSNCLNNEFNFFKRHICDANKEGMFLFRAARKLRQFLKMNSTGDFDLHLLKVSEGTTILLNCTGQVKGRKPAALGEAQPTKSLEENKSLKEQKKLNDLCFLKRLLQEIKTCWNKILMGTKEHGGGGSGGGGSGWNGSGGGGSGGGGSLNTTILTPNGNEDTTADFFLTTMPTDSLSVSTLPLPEVQCFVFNVEYMNCTWNSSSEPQPTNLTLHYWYKNSDNDKVQKCSHYLFSEEITSGCQLQKKEIHLYQTFVVQLQDPREPRRQATQMLKLQNLVIPWAPENLTLHKLSESQLELNWNNRFLNHCLEHLVQYRTDWDHSWTEQSVDYRHKFSLPSVDGQKRYTFRVRSRFNPLCGSAQHWSEWSHPIHWGSNTSKENPFLFALEA

SEQ ID NO: 239 - protein, 411 aa, Artificial
  synthesized IL2 fusion protein
MTILGTTFGMVFSLLQVVSGESGYAQNGDLEDAELDDYSFSCYSQLEVNGSQHSLTCAFEDPDVNTTNLEFEICGALVEVKCLNFRKLQEIYFIETKKFLLIGKSNICVKVGEKSLTCKKIDLTTIVKPEAPFDLSVIYREGANDFVVTFNTSHLQKKYVKVLMHDVAYRQEKDENKWTHVNLSSTKLTLLQRKLQPAAMYEIKVRSIPDHYFKGFWSEWSPSYYFRTPEINNSSGEMDGGGGSGWNGSGGGGSGGGGSDCDIEGKDGKQYESVLMVSIDQLLDSMKEIGSNCLNNEFNFFKRHICDANKEGMFLFRAARKLRQFLKMNSTGDFDLHLLKVSEGTTILLNCTGQVKGRKPAALGEAQPTKSLEENKSLKEQKKLNDLCFLKRLLQEIKTCWNKILMGTKEH

SEQ ID NO: 240 - protein, 439 aa, Artificial
  synthesized IL2 fusion protein
MLKPSLPFTSLLFLQLPLLGVGLNTTILTPNGNEDTTADFFLTTMPTDSLSVSTLPLPEVQCFVFNVEYMNCTWNSSSEPQPTNLTLHYWYKNSDNDKVQKCSHYLFSEEITSGCQLQKKEIHLYQTFVVQLQDPREPRRQATQMLKLQNLVIPWAPENLTLHKLSESQLELNWNNRFLNHCLEHLVQYRTDWDHSWTEQSVDYRHKFSLPSVDGQKRYTFRVRSRFNPLCGSAQHWSEWSHPIHWGSNTSKENPFLFALEAGGGGSGGGGSGWNGSGGGGSGGGGSDCDIEGKDGKQYESVLMVSIDQLLDSMKEIGSNCLNNEFNFFKRHICDANKEGMFLFRAARKLRQFLKMNSTGDFDLHLLKVSEGTTILLNCTGQVKGRKPAALGEAQPTKSLEENKSLKEQKKLNDLCFLKRLLQEIKTCWNKILMGTKEH

SEQ ID NO: 241 - protein, 391 aa, Artificial
  synthesized IL2 fusion protein
DCDIEGKDGKQYESVLMVSIDQLLDSMKEIGSNCLNNEFNFFKRHICDANKEGMFLFRAARKLRQFLKMNSTGDFDLHLLKVSEGTTILLNCTGQVKGRKPAALGEAQPTKSLEENKSLKEQKKLNDLCFLKRLLQEIKTCWNKILMGTKEHGGGGSGWNGSGGGGSGGGGSESGYAQNGDLEDAELDDYSFSCYSQLEVNGSQHSLTCAFEDPDVNTTNLEFEICGALVEVKCLNFRKLQEIYFIETKKFLLIGKSNICVKVGEKSLTCKKIDLTTIVKPEAPFDLSVIYREGANDFVVTFNTSHLQKKYVKVLMHDVAYRQEKDENKWTHVNLSSTKLTLLQRKLQPAAMYEIKVRSIPDHYFKGFWSEWSPSYYFRTPEINNSSGEMD

SEQ ID NO: 242 - protein, 417 aa, Artificial
  synthesized IL2 fusion protein
DCDIEGKDGKQYESVLMVSIDQLLDSMKEIGSNCLNNEFNFFKRHICDANKEGMFLFRAARKLRQFLKMNSTGDFDLHLLKVSEGTTILLNCTGQVKGRKPAALGEAQPTKSLEENKSLKEQKKLNDLCFLKRLLQEIKTCWNKILMGTKEHGGGGSGGGGSGWNGSGGGGSGGGGSLNTTILTPNGNEDTTADFFLTTMPTDSLSVSTLPLPEVQCFVFNVEYMNCTWNSSSEPQPTNLTLHYWYKNSDNDKVQKCSHYLFSEEITSGCQLQKKEIHLYQTFVVQLQDPREPRRQATQMLKLQNLVIPWAPENLTLHKLSESQLELNWNNRFLNHCLEHLVQYRTDWDHSWTEQSVDYRHKFSLPSVDGQKRYTFRVRSRFNPLCGSAQHWSEWSHPIHWGSNTSKENPFLFALEA

SEQ ID NO: 243 - protein, 391 aa, Artificial
  synthesized IL2 fusion protein
ESGYAQNGDLEDAELDDYSFSCYSQLEVNGSQHSLTCAFEDPDVNTTNLEFEICGALVEVKCLNFRKLQEIYFIETKKFLLIGKSNICVKVGEKSLTCKKIDLTTIVKPEAPFDLSVIYREGANDFVVTFNTSHLQKKYVKVLMHDVAYRQEKDENKWTHVNLSSTKLTLLQRKLQPAAMYEIKVRSIPDHYFKGFWSEWSPSYYFRTPEINNSSGEMDGGGGSGWNGSGGGGSGGGGSDCDIEGKDGKQYESVLMVSIDQLLDSMKEIGSNCLNNEFNFFKRHICDANKEGMFLFRAARKLRQFLKMNSTGDFDLHLLKVSEGTTILLNCTGQVKGRKPAALGEAQPTKSLEENKSLKEQKKLNDLCFLKRLLQEIKTCWNKILMGTKEH

SEQ ID NO: 244 - protein, 417 aa, Artificial
  synthesized IL2 fusion protein
LNTTILTPNGNEDTTADFFLTTMPTDSLSVSTLPLPEVQCFVFNVEYMNCTWNSSSEPQPTNLTLHYWYKNSDNDKVQKCSHYLFSEEITSGCQLQKKEIHLYQTFVVQLQDPREPRRQATQMLKLQNLVIPWAPENLTLHKLSESQLELNWNNRFLNHCLEHLVQYRTDWDHSWTEQSVDYRHKFSLPSVDGQKRYTFRVRSRFNPLCGSAQHWSEWSHPIHWGSNTSKENPFLFALEAGGGGSGGGGSGWNGSGGGGSGGGGSDCDIEGKDGKQYESVLMVSIDQLLDSMKEIGSNCLNNEFNFFKRHICDANKEGMFLFRAARKLRQFLKMNSTGDFDLHLLKVSEGTTILLNCTGQVKGRKPAALGEAQPTKSLEENKSLKEQKKLNDLCFLKRLLQEIKTCWNKILMGTKEH

SEQ ID NO: 245 - protein, 430 aa, Artificial
  synthesized IL2 fusion protein
MALTFALLVALLVLSCKSSCSVGCDLPQTHSLGSRRTLMLLAQMRRISLFSCLKDRHDFGFPQEEFGNQFQKAETIPVLHEMIQQIFNLFSTKDSSAAWDETLLDKFYTELYQQLNDLEACVIQGVGVTETPLMKEDSILAVRKYFQRITLYLKEKKYSPCAWEVVRAEIMRSFSLSTNLQESLRSKEGGGGSGGGGSGWNGSGGGGSGGGGSISYDSPDYTDESCTFKISLRNFRSILSWELKNHSIVPTHYTLLYTIMSKPEDLKVVKNCANTTRSFCDLTDEWRSTHEAYVTVLEGFSGNTTLFSCSHNFWLAIDMSFEPPEFEIVGFTNHINVVVKFPSIVEEELQFDLSLVIEEQSEGIVKKHKPEIKGNMSGNFTYIIDKLIPNTNYCVSVYLEHSDEQAVIKSPLKCTLLPPGQESESAESAK

SEQ ID NO: 246 - protein, 350 aa, Artificial
  synthesized IL2 fusion protein
MYRMQLLSCIALSLALVTNSAPTSSSTKKTQLQLEHLLLDLQMILNGINNYKNPKLTRMLTFKFYMPKKATELKHLQCLEEELKPLEEVLNLAQSKNFHLRPRDLISNINVIVLELKGSETTFMCEYADETATIVEFLNRWITFCQSIISTLTGGGGSGGGGSGGGGSGGGGSNATGGGGSGGGGSELCDDDPPEIPHATFKAMAYKEGTMLNCECKRGFRRIKSGSLYMLCTGNSSHSSWDNQCQCTSSATRNTTKQVTPQPEEQKERKTTEMQSPMQPVDQASLPGHCREPPPWENEATERIYHFVVGQMVYYQCVQGYRALHRGPAESVCKMTHGKTRWTQPQLICT

SEQ ID NO: 247 - protein, 405 aa, Artificial [sequence omitted]

SEQ ID NO: 248 - protein, 356 aa, Artificial
  synthesized IL2 fusion protein
MDSYLLMWGLLTFIMVPGCQAELCDDDPPEIPHATFKAMAYKEGTMLNCECKRGFRRIKSGSLYMLCTGNSSHSSWDNQCQCTSSATRNTTKQVTPQPEEQKERKTTEMQSPMQPVDQASLPGHCREPPPWENEATERIYHFVVGQMVYYQCVQGYRALHRGPAESVCKMTHGKTRWTQPQLICTGGGGSGGGGSGGGGSGGGGSGGGGSNATGGGGSGGGGSAPTSSSTKKTQLQLEHLLLDLQMILNGINNYKNPKLTRMLTFKFYMPKKATELKHLQCLEEELKPLEEVLNLAQSKNFHLRPRDLISNINVIVLELKGSETTFMCEYADETATIVEFLNRWITFCQSIISTLT

SEQ ID NO: 249 - protein, 411 aa, Artificial
  synthesized IL2 fusion protein
MDSYLLMWGLLTFIMVPGCQAELCDDDPPEIPHATFKAMAYKEGTMLNCECKRGFRRIKSGSLYMLCTGNSSHSSWDNQCQCTSSATRNTTKQVTPQPEEQKERKTTEMQSPMQPVDQASLPGHCREPPPWENEATERIYHFVVGQMVYYQCVQGYRALHRGPAESVCKMTHGKTRWTQPQLICTGEMETSQFPGEEKPQASPEGRPESETSCLVTTTDFQIQTEMAATMETSIFTTEYQGGGGSGGGGSGGGGSGGGGSGGGGSNATGGGGSGGGGSAPTSSSTKKTQLQLEHLLLDLQMILNGINNYKNPKLTRMLTFKFYMPKKATELKHLQCLEEELKPLEEVLNLAQSKNFHLRPRDLISNINVIVLELKGSETTFMCEYADETATIVEFLNRWITFCQSIISTLT

SEQ ID NO: 250 - protein, 385 aa, Artificial [sequence omitted]

SEQ ID NO: 251 - protein, 390 aa, Artificial [sequence omitted]

SEQ ID NO: 252 - protein, 413 aa, Artificial [sequence omitted]

SEQ ID NO: 253 - protein, 419 aa, Artificial
  synthesized IL2 fusion protein
MFHVSFRYIFGLPPLILVLLPVASSDCDIEGKDGKQYESVLMVSIDQLLDSMKEIGSNCLNNEFNFFKRHICDANKEGMFLFRAARKLRQFLKMNSTGDFDLHLLKVSEGTTILLNCTGQVKGRKPAALGEAQPTKSLEENKSLKEQKKLNDLCFLKRLLQEIKTCWNKILMGTKEHGGGGSGGGGSNATGGGGSGGGGSESGYAQNGDLEDAELDDYSFSCYSQLEVNGSQHSLTCAFEDPDVNTTNLEFEICGALVEVKCLNFRKLQEIYFIETKKFLLIGKSNICVKVGEKSLTCKKIDLTTIVKPEAPFDLSVIYREGANDFVVTFNTSHLQKKYVKVLMHDVAYRQEKDENKWTHVNLSSTKLTLLQRKLQPAAMYEIKVRSIPDHYFKGFWSEWSPSYYFRTPEINNSSGEMD

SEQ ID NO: 254 - protein, 445 aa, Artificial [sequence omitted]

SEQ ID NO: 255 - protein, 414 aa, Artificial
  synthesized IL2 fusion protein
MTILGTTFGMVFSLLQVVSGESGYAQNGDLEDAELDDYSFSCYSQLEVNGSQHSLTCAFEDPDVNTTNLEFEICGALVEVKCLNFRKLQEIYFIETKKFLLIGKSNICVKVGEKSLTCKKIDLTTIVKPEAPFDLSVIYREGANDFVVTFNTSHLQKKYVKVLMHDVAYRQEKDENKWTHVNLSSTKLTLLQRKLQPAAMYEIKVRSIPDHYFKGFWSEWSPSYYFRTPEINNSSGEMDGGGGSGGGGSNATGGGGSGGGGSDCDIEGKDGKQYESVLMVSIDQLLDSMKEIGSNCLNNEFNFFKRHICDANKEGMFLFRAARKLRQFLKMNSTGDFDLHLLKVSEGTTILLNCTGQVKGRKPAALGEAQPTKSLEENKSLKEQKKLNDLCFLKRLLQEIKTCWNKILMGTKEH

SEQ ID NO: 256 - protein, 442 aa, Artificial
  synthesized IL2 fusion protein
MLKPSLPFTSLLFLQLPLLGVGLNTTILTPNGNEDTTADFFLTTMPTDSLSVSTLPLPEVQCFVFNVEYMNCTWNSSSEPQPTNLTLHYWYKNSDNDKVQKCSHYLFSEEITSGCQLQKKEIHLYQTFVVQLQDPREPRRQATQMLKLQNLVIPWAPENLTLHKLSESQLELNWNNRFLNHCLEHLVQYRTDWDHSWTEQSVDYRHKFSLPSVDGQKRYTFRVRSRFNPLCGSAQHWSEWSHPIHWGSNTSKENPFLFALEAGGGGSGGGGSGGGGSNATGGGGSGGGGSDCDIEGKDGKQYESVLMVSIDQLLDSMKEIGSNCLNNEFNFFKRHICDANKEGMFLFRAARKLRQFLKMNSTGDFDLHLLKVSEGTTILLNCTGQVKGRKPAALGEAQPTKSLEENKSLKEQKKLNDLCFLKRLLQEIKTCWNKILMGTKEH

SEQ ID NO: 257 - protein, 394 aa, Artificial
  synthesized IL2 fusion protein
DCDIEGKDGKQYESVLMVSIDQLLDSMKEIGSNCLNNEFNFFKRHICDANKEGMFLFRAARKLRQFLKMNSTGDFDLHLLKVSEGTTILLNCTGQVKGRKPAALGEAQPTKSLEENKSLKEQKKLNDLCFLKRLLQEIKTCWNKILMGTKEHGGGGSGGGGSNATGGGGSGGGGSESGYAQNGDLEDAELDDYSFSCYSQLEVNGSQHSLTCAFEDPDVNTTNLEFEICGALVEVKCLNFRKLQEIYFIETKKFLLIGKSNICVKVGEKSLTCKKIDLTTIVKPEAPFDLSVIYREGANDFVVTFNTSHLQKKYVKVLMHDVAYRQEKDENKWTHVNLSSTKLTLLQRKLQPAAMYEIKVRSIPDHYFKGFWSEWSPSYYFRTPEINNSSGEMD

SEQ ID NO: 258 - protein, 420 aa, Artificial
  synthesized IL2 fusion protein
DCDIEGKDGKQYESVLMVSIDQLLDSMKEIGSNCLNNEFNFFKRHICDANKEGMFLFRAARKLRQFLKMNSTGDFDLHLLKVSEGTTILLNCTGQVKGRKPAALGEAQPTKSLEENKSLKEQKKLNDLCFLKRLLQEIKTCWNKILMGTKEHGGGGSGGGGSGGGGSNATGGGGSGGGGSLNTTILTPNGNEDTTADFFLTTMPTDSLSVSTLPLPEVQCFVFNVEYMNCTWNSSSEPQPTNLTLHYWYKNSDNDKVQKCSHYLFSEEITSGCQLQKKEIHLYQTFVVQLQDPREPRRQATQMLKLQNLVIPWAPENLTLHKLSESQLELNWNNRFLNHCLEHLVQYRTDWDHSWTEQSVDYRHKFSLPSVDGQKRYTFRVRSRFNPLCGSAQHWSEWSHPIHWGSNTSKENPFLFALEA

SEQ ID NO: 259 - protein, 394 aa, Artificial
  synthesized IL2 fusion protein
ESGYAQNGDLEDAELDDYSFSCYSQLEVNGSQHSLTCAFEDPDVNTTNLEFEICGALVEVKCLNFRKLQEIYFIETKKFLLIGKSNICVKVGEKSLTCKKIDLTTIVKPEAPFDLSVIYREGANDFVVTFNTSHLQKKYVKVLMHDVAYRQEKDENKWTHVNLSSTKLTLLQRKLQPAAMYEIKVRSIPDHYFKGFWSEWSPSYYFRTPEINNSSGEMDGGGGSGGGGSNATGGGGSGGGGSDCDIEGKDGKQYESVLMVSIDQLLDSMKEIGSNCLNNEFNFFKRHICDANKEGMFLFRAARKLRQFLKMNSTGDFDLHLLKVSEGTTILLNCTGQVKGRKPAALGEAQPTKSLEENKSLKEQKKLNDLCFLKRLLQEIKTCWNKILMGTKEH

SEQ ID NO: 260 - protein, 420 aa, Artificial
  synthesized IL2 fusion protein
LNTTILTPNGNEDTTADFFLTTMPTDSLSVSTLPLPEVQCFVFNVEYMNCTWNSSSEPQPTNLTLHYWYKNSDNDKVQKCSHYLFSEEITSGCQLQKKEIHLYQTFVVQLQDPREPRRQATQMLKLQNLVIPWAPENLTLHKLSESQLELNWNNRFLNHCLEHLVQYRTDWDHSWTEQSVDYRHKFSLPSVDGQKRYTFRVRSRFNPLCGSAQHWSEWSHPIHWGSNTSKENPFLFALEAGGGGSGGGGSGGGGSNATGGGGSGGGGSDCDIEGKDGKQYESVLMVSIDQLLDSMKEIGSNCLNNEFNFFKRHICDANKEGMFLFRAARKLRQFLKMNSTGDFDLHLLKVSEGTTILLNCTGQVKGRKPAALGEAQPTKSLEENKSLKEQKKLNDLCFLKRLLQEIKTCWNKILMGTKEH

SEQ ID NO: 261 - protein, 433 aa, Artificial [sequence omitted]

SEQ ID NO: 262 - protein, 400 aa, Artificial
  synthesized leptin fusion protein
MHWGTLCGFLWLWPYLFYVQAVPIQKVQDDTKTLIKTIVTRINDISHTQSVSSKQKVTGLDFIPGLHPILTLSKMDQTLAVYQQILTSMPSRNVIQISNDLENLRDLLHVLAFSKSCHLPWASGLETLDSLGGVLEASGYSTEVVALSRLQGSLQDMLWQLDLSPGCGGGGSGGGGSGGGGSGGNGSGGGGSIDVNINISCETDGYLTKMTCRWSTSTIQSLAESTLQLRYHRSSLYCSDIPSIHPISEPKDCYLQSDGFYECIFQPIFLLSGYTMWIRINHSLGSLDSPPTCVLPDSVVKPLPPSSVKAEITINIGLLKISWEKPVFPENNLQFQIRYGLSGKEVQWKMYEVYDAKSKSVSLPVPDLCAVYAVQVRCKRLDGLGYWSNWSNPAYTVVMD

SEQ ID NO: 263 - protein, 379 aa, Artificial
  synthesized leptin fusion protein
VPIQKVQDDTKTLIKTIVTRINDISHTQSVSSKQKVTGLDFIPGLHPILTLSKMDQTLAVYQQILTSMPSRNVIQISNDLENLRDLLHVLAFSKSCHLPWASGLETLDSLGGVLEASGYSTEVVALSRLQGSLQDMLWQLDLSPGCGGGGSGGGGSGGGGSGGNGSGGGGSIDVNINISCETDGYLTKMTCRWSTSTIQSLAESTLQLRYHRSSLYCSDIPSIHPISEPKDCYLQSDGFYECIFQPIFLLSGYTMWIRINHSLGSLDSPPTCVLPDSVVKPLPPSSVKAEITINIGLLKISWEKPVFPENNLQFQIRYGLSGKEVQWKMYEVYDAKSKSVSLPVPDLCAVYAVQVRCKRLDGLGYWSNWSNPAYTVVMD

SEQ ID NO: 264 - protein, 1010 aa, Artificial
  synthesized leptin fusion protein
MHWGTLCGFLWLWPYLFYVQAVPIQKVQDDTKTLIKTIVTRINDISHTQSVSSKQKVTGLDFIPGLHPILTLSKMDQTLAVYQQILTSMPSRNVIQISNDLENLRDLLHVLAFSKSCHLPWASGLETLDSLGGVLEASGYSTEVVALSRLQGSLQDMLWQLDLSPGCGGGGSGGGGSGGGGSGGNGSGGGGSFNLSYPITPWRFKLSCMPPNSTYDYFLLPAGLSKNTSNSNGHYETAVEPKFNSSGTHFSNLSKTTFHCCFRSEQDRNCSLCADNIEGKTFVSTVNSLVFQQIDANWNIQCWLKGDLKLFICYVESLFKNLFRNYNYKVHLLYVLPEVLEDSPLVPQKGSFQMVHCNCSVHECCECLVPVPTAKLNDTLLMCLKITSGGVIFQSPLMSVQPINMVKPDPPLGLHMEITDDGNLKISWSSPPLVPFPLQYQVKYSENSTTVIREADKIVSATSLLVDSILPGSSYEVQVRGKRLDGPGIWSDWSTPRVFTTQDVIYFPPKILTSVGSNVSFHCIYKKENKIVPSKEIVWWMNLAEKIPQSQYDVVSDHVSKVTFFNLNETKPRGKFTYDAVYCCNEHECHHRYAELYVIDVNINISCETDGYLTKMTCRWSTSTIQSLAESTLQLRYHRSSLYCSDIPSIHPISEPKDCYLQSDGFYECIFQPIFLLSGYTMWIRINHSLGSLDSPPTCVLPDSVVKPLPPSSVKAEITINIGLLKISWEKPVFPENNLQFQIRYGLSGKEVQWKMYEVYDAKSKSVSLPVPDLCAVYAVQVRCKRLDGLGYWSNWSNPAYTVVMDIKVPMRGPEFWRIINGDTMKKEKNVTLLWKPLMKNDSLCSVQRYVINHHTSCNGTWSEDVGNHTKFTFLWTEQAHTVTVLAINSIGASVANFNLTFSWPMSKVNIVQSLSAYPLNSSCVIVSWILSPSDYKLMYFIIEWKNLNEDGEIKWLRISSSVKKYYIHDHFIPIEKYQFSLYPIFMEGVGKPKIINSFTQDDIEKHQSD

SEQ ID NO: 265 - protein, 1181 aa, Artificial
  synthesized leptin fusion protein
MHWGTLCGFLWLWPYLFYVQAVPIQKVQDDTKTLIKTIVTRINDISHTQSVSSKQKVTGLDFIPGLHPILTLSKMDQTLAVYQQILTSMPSRNVIQISNDLENLRDLLHVLAFSKSCHLPWASGLETLDSLGGVLEASGYSTEVVALSRLQGSLQDMLWQLDLSPGCGGGGSGGGGSGGGGSGGNGSGGGGSVPIQKVQDDTKTLIKTIVTRINDISHTQSVSSKQKVTGLDFIPGLHPILTLSKMDQTLAVYQQILTSMPSRNVIQISNDLENLRDLLHVLAFSKSCHLPWASGLETLDSLGGVLEASGYSTEVVALSRLQGSLQDMLWQLDLSPGCGGGGSGGGGSGGGGSGGNGSGGGGSFNLSYPITPWRFKLSCMPPNSTYDYFLLPAGLSKNTSNSNGHYETAVEPKFNSSGTHFSNLSKTTFHCCFRSEQDRNCSLCADNIEGKTFVSTVNSLVFQQIDANWNIQCWLKGDLKLFICYVESLFKNLFRNYNYKVHLLYVLPEVLEDSPLVPQKGSFQMVHCNCSVHECCECLVPVPTAKLNDTLLMCLKITSGGVIFQSPLMSVQPINMVKPDPPLGLHMEITDDGNLKISWSSPPLVPFPLQYQVKYSENSTTVIREADKIVSATSLLVDSILPGSSYEVQVRGKRLDGPGIWSDWSTPRVFTTQDVIYFPPKILTSVGSNVSFHCIYKKENKIVPSKEIVWWMNLAEKIPQSQYDVVSDHVSKVTFFNLNETKPRGKFTYDAVYCCNEHECHHRYAELYVIDVNINISCETDGYLTKMTCRWSTSTIQSLAESTLQLRYHRSSLYCSDIPSIHPISEPKDCYLQSDGFYECIFQPIFLLSGYTMWIRINHSLGSLDSPPTCVLPDSVVKPLPPSSVKAEITINIGLLKISWEKPVFPENNLQFQIRYGLSGKEVQWKMYEVYDAKSKSVSLPVPDLCAVYAVQVRCKRLDGLGYWSNWSNPAYTVVMDIKVPMRGPEFWRIINGDTMKKEKNVTLLWKPLMKNDSLCSVQRYVINHHTSCNGTWSEDVGNHTKFTFLWTEQAHTVTVLAINSIGASVANFNLTFSWPMSKVNIVQSLSAYPLNSSCVIVSWILSPSDYKLMYFIIEWKNLNEDGEIKWLRISSSVKKYYIHDHFIPIEKYQFSLYPIFMEGVGKPKIINSFTQDDIEKHQSD

SEQ ID NO: 266 - protein, 507 aa, Artificial
  synthesized leptin fusion protein
MHWGTLCGFLWLWPYLFYVQAVPIQKVQDDTKTLIKTIVTRINDISHTQSVSSKQKVTGLDFIPGLHPILTLSKMDQTLAVYQQILTSMPSRNVIQISNDLENLRDLLHVLAFSKSCHLPWASGLETLDSLGGVLEASGYSTEVVALSRLQGSLQDMLWQLDLSPGCGGGGSGGGGSGGGGSGGNGSGGGGSGGGGSRVFTTQDVIYFPPKILTSVGSNVSFHCIYKKENKIVPSKEIVWWMNLAEKIPQSQYDVVSDHVSKVTFFNLNETKPRGKFTYDAVYCCNEHECHHRYAELYVIDVNINISCETDGYLTKMTCRWSTSTIQSLAESTLQLRYHRSSLYCSDIPSIHPISEPKDCYLQSDGFYECIFQPIFLLSGYTMWIRINHSLGSLDSPPTCVLPDSVVKPLPPSSVKAEITINIGLLKISWEKPVFPENNLQFQIRYGLSGKEVQWKMYEVYDAKSKSVSLPVPDLCAVYAVQVRCKRLDGLGYWSNWSNPAYTVVMD

SEQ ID NO: 267 - protein, 407 aa, Artificial
  synthesized leptin fusion protein
MHWGTLCGFLWLWPYLFYVQAVPIQKVQDDTKTLIKTIVTRINDISHTQSVSSKQKVTGLDFIPGLHPILTLSKMDQTLAVYQQILTSMPSRNVIQISNDLENLRDLLHVLAFSKSCHLPWASGLETLDSLGGVLEASGYSTEVVALSRLQGSLQDMLWQLDLSPGCGGGGSGGGGSGGGGSGGNGSGGGGSGGGGSRVFTTQDVIYFPPKILTSVGSNVSFHCIYKKENKIVPSKEIVWWMNLAEKIPQSQYDVVSDHVSKVTFFNLNETKPRGKFTYDAVYCCNEHECHHRYAELYVIDVNINISCETDGYLTKMTCRWSTSTIQSLAESTLQLRYHRSSLYCSDIPSIHPISEPKDCYLQSDGFYECIFQPIFLLSGYTMWIRINHSLGSLDSPPTCVLPDSVV

SEQ ID NO: 268 - protein, 405 aa, Artificial
  synthesized leptin fusion protein
MICQKFCVVLLHWEFIYVITAIDVNINISCETDGYLTKMTCRWSTSTIQSLAESTLQLRYHRSSLYCSDIPSIHPISEPKDCYLQSDGFYECIFQPIFLLSGYTMWIRINHSLGSLDSPPTCVLPDSVVKPLPPSSVKAEITINIGLLKISWEKPVFPENNLQFQIRYGLSGKEVQWKMYEVYDAKSKSVSLPVPDLCAVYAVQVRCKRLDGLGYWSNWSNPAYTVVMDGGGGSGGGGSGGGGSGGNGSGGGGSGGGGSVPIQKVQDDTKTLIKTIVTRINDISHTQSVSSKQKVTGLDFIPGLHPILTLSKMDQTLAVYQQILTSMPSRNVIQISNDLENLRDLLHVLAFSKSCHLPWASGLETLDSLGGVLEASGYSTEVVALSRLQGSLQDMLWQLDLSPGC

SEQ ID NO: 269 - protein, 1015 aa, Artificial
  synthesized leptin fusion protein
MICQKFCVVLLHWEFIYVITAFNLSYPITPWRFKLSCMPPNSTYDYFLLPAGLSKNTSNSNGHYETAVEPKFNSSGTHFSNLSKTTFHCCFRSEQDRNCSLCADNIEGKTFVSTVNSLVFQQIDANWNIQCWLKGDLKLFICYVESLFKNLFRNYNYKVHLLYVLPEVLEDSPLVPQKGSFQMVHCNCSVHECCECLVPVPTAKLNDTLLMCLKITSGGVIFQSPLMSVQPINMVKPDPPLGLHMEITDDGNLKISWSSPPLVPFPLQYQVKYSENSTTVIREADKIVSATSLLVDSILPGSSYEVQVRGKRLDGPGIWSDWSTPRVFTTQDVIYFPPKILTSVGSNVSFHCIYKKENKIVPSKEIVWWMNLAEKIPQSQYDVVSDHVSKVTFFNLNETKPRGKFTYDAVYCCNEHECHHRYAELYVIDVNINISCETDGYLTKMTCRWSTSTIQSLAESTLQLRYHRSSLYCSDIPSIHPISEPKDCYLQSDGFYECIFQPIFLLSGYTMWIRINHSLGSLDSPPTCVLPDSVVKPLPPSSVKAEITINIGLLKISWEKPVFPENNLQFQIRYGLSGKEVQWKMYEVYDAKSKSVSLPVPDLCAVYAVQVRCKRLDGLGYWSNWSNPAYTVVMDIKVPMRGPEFWRIINGDTMKKEKNVTLLWKPLMKNDSLCSVQRYVINHHTSCNGTWSEDVGNHTKFTFLWTEQAHTVTVLAINSIGASVANFNLTFSWPMSKVNIVQSLSAYPLNSSCVIVSWILSPSDYKLMYFIIEWKNLNEDGEIKWLRISSSVKKYYIHDHFIPIEKYQFSLYPIFMEGVGKPKIINSFTQDDIEKHQSDGGGGSGGGGSGGGGSGGNGSGGGGSGGGGSVPIQKVQDDTKTLIKTIVTRINDISHTQSVSSKQKVTGLDFIPGLHPILTLSKMDQTLAVYQQILTSMPSRNVIQISNDLENLRDLLHVLAFSKSCHLPWASGLETLDSLGGVLEASGYSTEVVALSRLQGSLQDMLWQLDLSPGC

SEQ ID NO: 270 - protein, 1181 aa, Artificial
  synthesized leptin fusion protein
MICQKFCVVLLHWEFIYVITAFNLSYPITPWRFKLSCMPPNSTYDYFLLPAGLSKNTSNSNGHYETAVEPKFNSSGTHFSNLSKTTFHCCFRSEQDRNCSLCADNIEGKTFVSTVNSLVFQQIDANWNIQCWLKGDLKLFICYVESLFKNLFRNYNYKVHLLYVLPEVLEDSPLVPQKGSFQMVHCNCSVHECCECLVPVPTAKLNDTLLMCLKITSGGVIFQSPLMSVQPINMVKPDPPLGLHMEITDDGNLKISWSSPPLVPFPLQYQVKYSENSTTVIREADKIVSATSLLVDSILPGSSYEVQVRGKRLDGPGIWSDWSTPRVFTTQDVIYFPPKILTSVGSNVSFHCIYKKENKIVPSKEIVWWMNLAEKIPQSQYDVVSDHVSKVTFFNLNETKPRGKFTYDAVYCCNEHECHHRYAELYVIDVNINISCETDGYLTKMTCRWSTSTIQSLAESTLQLRYHRSSLYCSDIPSIHPISEPKDCYLQSDGFYECIFQPIFLLSGYTMWIRINHSLGSLDSPPTCVLPDSVVKPLPPSSVKAEITINIGLLKISWEKPVFPENNLQFQIRYGLSGKEVQWKMYEVYDAKSKSVSLPVPDLCAVYAVQVRCKRLDGLGYWSNWSNPAYTVVMDIKVPMRGPEFWRIINGDTMKKEKNVTLLWKPLMKNDSLCSVQRYVINHHTSCNGTWSEDVGNHTKFTFLWTEQAHTVTVLAINSIGASVANFNLTFSWPMSKVNIVQSLSAYPLNSSCVIVSWILSPSDYKLMYFIIEWKNLNEDGEIKWLRISSSVKKYYIHDHFIPIEKYQFSLYPIFMEGVGKPKIINSFTQDDIEKHQSDGGGGSGGGGSGGGGSGGNGSGGGGSVPIQKVQDDTKTLIKTIVTRINDISHTQSVSSKQKVTGLDFIPGLHPILTLSKMDQTLAVYQQILTSMPSRNVIQISNDLENLRDLLHVLAFSKSCHLPWASGLETLDSLGGVLEASGYSTEVVALSRLQGSLQDMLWQLDLSPGCGGGGSGGGGSGGGGSGGNGSGGGGSVPIQKVQDDTKTLIKTIVTRINDISHTQSVSSKQKVTGLDFIPGLHPILTLSKMDQTLAVYQQILTSMPSRNVIQISNDLENLRDLLHVLAFSKSCHLPWASGLETLDSLGGVLEASGYSTEVVALSRLQGSLQDMLWQLDLSPGC

SEQ ID NO: 271 - protein, 507 aa, Artificial
  synthesized leptin fusion protein
MICQKFCVVLLHWEFIYVITARVFTTQDVIYFPPKILTSVGSNVSFHCIYKKENKIVPSKEIVWWMNLAEKIPQSQYDVVSDHVSKVTFFNLNETKPRGKFTYDAVYCCNEHECHHRYAELYVIDVNINISCETDGYLTKMTCRWSTSTIQSLAESTLQLRYHRSSLYCSDIPSIHPISEPKDCYLQSDGFYECIFQPIFLLSGYTMWIRINHSLGSLDSPPTCVLPDSVVKPLPPSSVKAEITINIGLLKISWEKPVFPENNLQFQIRYGLSGKEVQWKMYEVYDAKSKSVSLPVPDLCAVYAVQVRCKRLDGLGYWSNWSNPAYTVVMDGGGGSGGGGSGGGGSGGNGSGGGGSGGGGSVPIQKVQDDTKTLIKTIVTRINDISHTQSVSSKQKVTGLDFIPGLHPILTLSKMDQTLAVYQQILTSMPSRNVIQISNDLENLRDLLHVLAFSKSCHLPWASGLETLDSLGGVLEASGYSTEVVALSRLQGSLQDMLWQLDLSPGC

SEQ ID NO: 272 - protein, 407 aa, Artificial
  synthesized leptin fusion protein
MICQKFCVVLLHWEFIYVITARVFTTQDVIYFPPKILTSVGSNVSFHCIYKKENKIVPSKEIVWWMNLAEKIPQSQYDVVSDHVSKVTFFNLNETKPRGKFTYDAVYCCNEHECHHRYAELYVIDVNINISCETDGYLTKMTCRWSTSTIQSLAESTLQLRYHRSSLYCSDIPSIHPISEPKDCYLQSDGFYECIFQPIFLLSGYTMWIRINHSLGSLDSPPTCVLPDSVVGGGGSGGGGSGGGGSGGNGSGGGGSGGGGSVPIQKVQDDTKTLIKTIVTRINDISHTQSVSSKQKVTGLDFIPGLHPILTLSKMDQTLAVYQQILTSMPSRNVIQISNDLENLRDLLHVLAFSKSCHLPWASGLETLDSLGGVLEASGYSTEVVALSRLQGSLQDMLWQLDLSPGC

SEQ ID NO: 273 - protein, 711 aa, Artificial
  synthesized leptin fusion protein
MHWGTLCGFLWLWPYLFYVQAVPIQKVQDDTKTLIKTIVTRINDISHTQSVSSKQKVTGLDFIPGLHPILTLSKMDQTLAVYQQILTSMPSRNVIQISNDLENLRDLLHVLAFSKSCHLPWASGLETLDSLGGVLEASGYSTEVVALSRLQGSLQDMLWQLDLSPGCGGGGSGGGGSGGGGSGGNGSGGGGSGGGGSRVFTTQDVIYFPPKILTSVGSNVSFHCIYKKENKIVPSKEIVWWMNLAEKIPQSQYDVVSDHVSKVTFFNLNETKPRGKFTYDAVYCCNEHECHHRYAELYVIDVNINISCETDGYLTKMTCRWSTSTIQSLAESTLQLRYHRSSLYCSDIPSIHPISEPKDCYLQSDGFYECIFQPIFLLSGYTMWIRINHSLGSLDSPPTCVLPDSVVKPLPPSSVKAEITINIGLLKISWEKPVFPENNLQFQIRYGLSGKEVQWKMYEVYDAKSKSVSLPVPDLCAVYAVQVRCKRLDGLGYWSNWSNPAYTVVMDIKVPMRGPEFWRIINGDTMKKEKNVTLLWKPLMKNDSLCSVQRYVINHHTSCNGTWSEDVGNHTKFTFLWTEQAHTVTVLAINSIGASVANFNLTFSWPMSKVNIVQSLSAYPLNSSCVIVSWILSPSDYKLMYFIIEWKNLNEDGEIKWLRISSSVKKYYIHDHFIPIEKYQFSLYPIFMEGVGKPKIINSFTQDDIEKHQSD

SEQ ID NO: 274 - protein, 771 aa, Artificial
  synthesized leptin fusion protein
MICQKFCVVLLHWEFIYVITAGHYETAVEPKFNSSGTHFSNLSKTTFHCCFRSEQDRNCSLCADNIEGKTFVSTVNSLVFQQIDANWNIQCWLKGDLKLFICYVESLFKNLFRNYNYKVHLLYVLPEVLEDSPLVPQKGSFQMVHCNCSVHECCECLVPVPTAKLNDTLLMCLKITSGGVIFQSPLMSVQPINMVKPDPPLGLHMEITDDGNLKISWSSPPLVPFPLQYQVKYSENSTTVIREADKIVSATSLLVDSILPGSSYEVQVRGKRLDGPGIWSDWSTPRVFTTQDVIYFPPKILTSVGSNVSFHCIYKKENKIVPSKEIVWWMNLAEKIPQSQYDVVSDHVSKVTFFNLNETKPRGKFTYDAVYCCNEHECHHRYAELYVIDVNINISCETDGYLTKMTCRWSTSTIQSLAESTLQLRYHRSSLYCSDIPSIHPISEPKDCYLQSDGFYECIFQPIFLLSGYTMWIRINHSLGSLDSPPTCVLPDSVVKPLPPSSVKAEITINIGLLKISWEKPVFPENNLQFQIRYGLSGKEVQWKMYEVYDAKSKSVSLPVPDLCAVYAVQVRCKRLDGLGYWSNWSNPAYTVVMDGGGGSGGGGSGGGGSGGNGSGGGGSGGGGSVPIQKVQDDTKTLIKTIVTRINDISHTQSVSSKQKVTGLDFIPGLHPILTLSKMDQTLAVYQQILTSMPSRNVIQISNDLENLRDLLHVLAFSKSCHLPWASGLETLDSLGGVLEASGYSTEVVALSRLQGSLQDMLWQLDLSPGC

SEQ ID NO: 275 - protein, 400 aa, Artificial
  synthesized leptin fusion protein
MHWGTLCGFLWLWPYLFYVQAVPIQKVQDDTKTLIKTIVTRINDISHTQSVSSKQKVTGLDFIPGLHPILTLSKMDQTLAVYQQILTSMPSRNVIQISNDLENLRDLLHVLAFSKSCHLPWASGLETLDSLGGVLEASGYSTEVVALSRLQGSLQDMLWQLDLSPGCGGGGSGGGGSGGGGSGGNGTGGGGSIDVNINISCETDGYLTKMTCRWSTSTIQSLAESTLQLRYHRSSLYCSDIPSIHPISEPKDCYLQSDGFYECIFQPIFLLSGYTMWIRINHSLGSLDSPPTCVLPDSVVKPLPPSSVKAEITINIGLLKISWEKPVFPENNLQFQIRYGLSGKEVQWKMYEVYDAKSKSVSLPVPDLCAVYAVQVRCKRLDGLGYWSNWSNPAYTVVMD

SEQ ID NO: 276 - protein, 379 aa, Artificial
  synthesized leptin fusion protein
VPIQKVQDDTKTLIKTIVTRINDISHTQSVSSKQKVTGLDFIPGLHPILTLSKMDQTLAVYQQILTSMPSRNVIQISNDLENLRDLLHVLAFSKSCHLPWASGLETLDSLGGVLEASGYSTEVVALSRLQGSLQDMLWQLDLSPGCGGGGSGGGGSGGGGSGGNGTGGGGSIDVNINISCETDGYLTKMTCRWSTSTIQSLAESTLQLRYHRSSLYCSDIPSIHPISEPKDCYLQSDGFYECIFQPIFLLSGYTMWIRINHSLGSLDSPPTCVLPDSVVKPLPPSSVKAEITINIGLLKISWEKPVFPENNLQFQIRYGLSGKEVQWKMYEVYDAKSKSVSLPVPDLCAVYAVQVRCKRLDGLGYWSNWSNPAYTVVMD

SEQ ID NO: 277 - protein, 1010 aa, Artificial
  synthesized leptin fusion protein
MHWGTLCGFLWLWPYLFYVQAVPIQKVQDDTKTLIKTIVTRINDISHTQSVSSKQKVTGLDFIPGLHPILTLSKMDQTLAVYQQILTSMPSRNVIQISNDLENLRDLLHVLAFSKSCHLPWASGLETLDSLGGVLEASGYSTEVVALSRLQGSLQDMLWQLDLSPGCGGGGSGGGGSGGGGSGGNGTGGGGSFNLSYPITPWRFKLSCMPPNSTYDYFLLPAGLSKNTSNSNGHYETAVEPKFNSSGTHFSNLSKTTFHCCFRSEQDRNCSLCADNIEGKTFVSTVNSLVFQQIDANWNIQCWLKGDLKLFICYVESLFKNLFRNYNYKVHLLYVLPEVLEDSPLVPQKGSFQMVHCNCSVHECCECLVPVPTAKLNDTLLMCLKITSGGVIFQSPLMSVQPINMVKPDPPLGLHMEITDDGNLKISWSSPPLVPFPLQYQVKYSENSTTVIREADKIVSATSLLVDSILPGSSYEVQVRGKRLDGPGIWSDWSTPRVFTTQDVIYFPPKILTSVGSNVSFHCIYKKENKIVPSKEIVWWMNLAEKIPQSQYDVVSDHVSKVTFFNLNETKPRGKFTYDAVYCCNEHECHHRYAELYVIDVNINISCETDGYLTKMTCRWSTSTIQSLAESTLQLRYHRSSLYCSDIPSIHPISEPKDCYLQSDGFYECIFQPIFLLSGYTMWIRINHSLGSLDSPPTCVLPDSVVKPLPPSSVKAEITINIGLLKISWEKPVFPENNLQFQIRYGLSGKEVQWKMYEVYDAKSKSVSLPVPDLCAVYAVQVRCKRLDGLGYWSNWSNPAYTVVMDIKVPMRGPEFWRIINGDTMKKEKNVTLLWKPLMKNDSLCSVQRYVINHHTSCNGTWSEDVGNHTKFTFLWTEQAHTVTVLAINSIGASVANFNLTFSWPMSKVNIVQSLSAYPLNSSCVIVSWILSPSDYKLMYFIIEWKNLNEDGEIKWLRISSSVKKYYIHDHFIPIEKYQFSLYPIFMEGVGKPKIINSFTQDDIEKHQSD

SEQ ID NO: 278 - protein, 1181 aa, Artificial
  synthesized leptin fusion protein
MHWGTLCGFLWLWPYLFYVQAVPIQKVQDDTKTLIKTIVTRINDISHTQSVSSKQKVTGLDFIPGLHPILTLSKMDQTLAVYQQILTSMPSRNVIQISNDLENLRDLLHVLAFSKSCHLPWASGLETLDSLGGVLEASGYSTEVVALSRLQGSLQDMLWQLDLSPGCGGGGSGGGGSGGGGSGGNGTGGGGSVPIQKVQDDTKTLIKTIVTRINDISHTQSVSSKQKVTGLDFIPGLHPILTLSKMDQTLAVYQQILTSMPSRNVIQISNDLENLRDLLHVLAFSKSCHLPWASGLETLDSLGGVLEASGYSTEVVALSRLQGSLQDMLWQLDLSPGCGGGGSGGGGSGGGGSGGNGTGGGGSFNLSYPITPWRFKLSCMPPNSTYDYFLLPAGLSKNTSNSNGHYETAVEPKFNSSGTHFSNLSKTTFHCCFRSEQDRNCSLCADNIEGKTFVSTVNSLVFQQIDANWNIQCWLKGDLKLFICYVESLFKNLFRNYNYKVHLLYVLPEVLEDSPLVPQKGSFQMVHCNCSVHECCECLVPVPTAKLNDTLLMCLKITSGGVIFQSPLMSVQPINMVKPDPPLGLHMEITDDGNLKISWSSPPLVPFPLQYQVKYSENSTTVIREADKIVSATSLLVDSILPGSSYEVQVRGKRLDGPGIWSDWSTPRVFTTQDVIYFPPKILTSVGSNVSFHCIYKKENKIVPSKEIVWWMNLAEKIPQSQYDVVSDHVSKVTFFNLNETKPRGKFTYDAVYCCNEHECHHRYAELYVIDVNINISCETDGYLTKMTCRWSTSTIQSLAESTLQLRYHRSSLYCSDIPSIHPISEPKDCYLQSDGFYECIFQPIFLLSGYTMWIRINHSLGSLDSPPTCVLPDSVVKPLPPSSVKAEITINIGLLKISWEKPVFPENNLQFQIRYGLSGKEVQWKMYEVYDAKSKSVSLPVPDLCAVYAVQVRCKRLDGLGYWSNWSNPAYTVVMDIKVPMRGPEFWRIINGDTMKKEKNVTLLWKPLMKNDSLCSVQRYVINHHTSCNGTWSEDVGNHTKFTFLWTEQAHTVTVLAINSIGASVANFNLTFSWPMSKVNIVQSLSAYPLNSSCVIVSWILSPSDYKLMYFIIEWKNLNEDGEIKWLRISSSVKKYYIHDHFIPIEKYQFSLYPIFMEGVGKPKIINSFTQDDIEKHQSD

SEQ ID NO: 279 - protein, 507 aa, Artificial
  synthesized leptin fusion protein
MHWGTLCGFLWLWPYLFYVQAVPIQKVQDDTKTLIKTIVTRINDISHTQSVSSKQKVTGLDFIPGLHPILTLSKMDQTLAVYQQILTSMPSRNVIQISNDLENLRDLLHVLAFSKSCHLPWASGLETLDSLGGVLEASGYSTEVVALSRLQGSLQDMLWQLDLSPGCGGGGSGGGGSGGGGSGGNGTGGGGSGGGGSRVFTTQDVIYFPPKILTSVGSNVSFHCIYKKENKIVPSKEIVWWMNLAEKIPQSQYDVVSDHVSKVTFFNLNETKPRGKFTYDAVYCCNEHECHHRYAELYVIDVNINISCETDGYLTKMTCRWSTSTIQSLAESTLQLRYHRSSLYCSDIPSIHPISEPKDCYLQSDGFYECIFQPIFLLSGYTMWIRINHSLGSLDSPPTCVLPDSVVKPLPPSSVKAEITINIGLLKISWEKPVFPENNLQFQIRYGLSGKEVQWKMYEVYDAKSKSVSLPVPDLCAVYAVQVRCKRLDGLGYWSNWSNPAYTVVMD

SEQ ID NO: 280 - protein, 407 aa, Artificial
  synthesized leptin fusion protein
MHWGTLCGFLWLWPYLFYVQAVPIQKVQDDTKTLIKTIVTRINDISHTQSVSSKQKVTGLDFIPGLHPILTLSKMDQTLAVYQQILTSMPSRNVIQISNDLENLRDLLHVLAFSKSCHLPWASGLETLDSLGGVLEASGYSTEVVALSRLQGSLQDMLWQLDLSPGCGGGGSGGGGSGGGGSGGNGTGGGGSGGGGSRVFTTQDVIYFPPKILTSVGSNVSFHCIYKKENKIVPSKEIVWWMNLAEKIPQSQYDVVSDHVSKVTFFNLNETKPRGKFTYDAVYCCNEHECHHRYAELYVIDVNINISCETDGYLTKMTCRWSTSTIQSLAESTLQLRYHRSSLYCSDIPSIHPISEPKDCYLQSDGFYECIFQPIFLLSGYTMWIRINHSLGSLDSPPTCVLPDSVV

SEQ ID NO: 281 - protein, 405 aa, Artificial
  synthesized leptin fusion protein
MICQKFCVVLLHWEFIYVITAIDVNINISCETDGYLTKMTCRWSTSTIQSLAESTLQLRYHRSSLYCSDIPSIHPISEPKDCYLQSDGFYECIFQPIFLLSGYTMWIRINHSLGSLDSPPTCVLPDSVVKPLPPSSVKAEITINIGLLKISWEKPVFPENNLQFQIRYGLSGKEVQWKMYEVYDAKSKSVSLPVPDLCAVYAVQVRCKRLDGLGYWSNWSNPAYTVVMDGGGGSGGGGSGGGGSGGNGTGGGGSGGGGSVPIQKVQDDTKTLIKTIVTRINDISHTQSVSSKQKVTGLDFIPGLHPILTLSKMDQTLAVYQQILTSMPSRNVIQISNDLENLRDLLHVLAFSKSCHLPWASGLETLDSLGGVLEASGYSTEVVALSRLQGSLQDMLWQLDLSPGC

SEQ ID NO: 282 - protein, 1015 aa, Artificial
  synthesized leptin fusion protein
MICQKFCVVLLHWEFIYVITAFNLSYPITPWRFKLSCMPPNSTYDYFLLPAGLSKNTSNSNGHYETAVEPKFNSSGTHFSNLSKTTFHCCFRSEQDRNCSLCADNIEGKTFVSTVNSLVFQQIDANWNIQCWLKGDLKLFICYVESLFKNLFRNYNYKVHLLYVLPEVLEDSPLVPQKGSFQMVHCNCSVHECCECLVPVPTAKLNDTLLMCLKITSGGVIFQSPLMSVQPINMVKPDPPLGLHMEITDDGNLKISWSSPPLVPFPLQYQVKYSENSTTVIREADKIVSATSLLVDSILPGSSYEVQVRGKRLDGPGIWSDWSTPRVFTTQDVIYFPPKILTSVGSNVSFHCIYKKENKIVPSKEIVWWMNLAEKIPQSQYDVVSDHVSKVTFFNLNETKPRGKFTYDAVYCCNEHECHHRYAELYVIDVNINISCETDGYLTKMTCRWSTSTIQSLAESTLQLRYHRSSLYCSDIPSIHPISEPKDCYLQSDGFYECIFQPIFLLSGYTMWIRINHSLGSLDSPPTCVLPDSVVKPLPPSSVKAEITINIGLLKISWEKPVFPENNLQFQIRYGLSGKEVQWKMYEVYDAKSKSVSLPVPDLCAVYAVQVRCKRLDGLGYWSNWSNPAYTVVMDIKVPMRGPEFWRIINGDTMKKEKNVTLLWKPLMKNDSLCSVQRYVINHHTSCNGTWSEDVGNHTKFTFLWTEQAHTVTVLAINSIGASVANFNLTFSWPMSKVNIVQSLSAYPLNSSCVIVSWILSPSDYKLMYFIIEWKNLNEDGEIKWLRISSSVKKYYIHDHFIPIEKYQFSLYPIFMEGVGKPKIINSFTQDDIEKHQSDGGGGSGGGGSGGGGSGGNGTGGGGSGGGGSVPIQKVQDDTKTLIKTIVTRINDISHTQSVSSKQKVTGLDFIPGLHPILTLSKMDQTLAVYQQILTSMPSRNVIQISNDLENLRDLLHVLAFSKSCHLPWASGLETLDSLGGVLEASGYSTEVVALSRLQGSLQDMLWQLDLSPGC

SEQ ID NO: 283 - protein, 1181 aa, Artificial
  synthesized leptin fusion protein
MICQKFCVVLLHWEFIYVITAFNLSYPITPWRFKLSCMPPNSTYDYFLLPAGLSKNTSNSNGHYETAVEPKFNSSGTHFSNLSKTTFHCCFRSEQDRNCSLCADNIEGKTFVSTVNSLVFQQIDANWNIQCWLKGDLKLFICYVESLFKNLFRNYNYKVHLLYVLPEVLEDSPLVPQKGSFQMVHCNCSVHECCECLVPVPTAKLNDTLLMCLKITSGGVIFQSPLMSVQPINMVKPDPPLGLHMEITDDGNLKISWSSPPLVPFPLQYQVKYSENSTTVIREADKIVSATSLLVDSILPGSSYEVQVRGKRLDGPGIWSDWSTPRVFTTQDVIYFPPKILTSVGSNVSFHCIYKKENKIVPSKEIVWWMNLAEKIPQSQYDVVSDHVSKVTFFNLNETKPRGKFTYDAVYCCNEHECHHRYAELYVIDVNINISCETDGYLTKMTCRWSTSTIQSLAESTLQLRYHRSSLYCSDIPSIHPISEPKDCYLQSDGFYECIFQPIFLLSGYTMWIRINHSLGSLDSPPTCVLPDSVVKPLPPSSVKAEITINIGLLKISWEKPVFPENNLQFQIRYGLSGKEVQWKMYEVYDAKSKSVSLPVPDLCAVYAVQVRCKRLDGLGYWSNWSNPAYTVVMDIKVPMRGPEFWRIINGDTMKKEKNVTLLWKPLMKNDSLCSVQRYVINHHTSCNGTWSEDVGNHTKFTFLWTEQAHTVTVLAINSIGASVANFNLTFSWPMSKVNIVQSLSAYPLNSSCVIVSWILSPSDYKLMYFIIEWKNLNEDGEIKWLRISSSVKKYYIHDHFIPIEKYQFSLYPIFMEGVGKPKIINSFTQDDIEKHQSDGGGGSGGGGSGGGGSGGNGTGGGGSVPIQKVQDDTKTLIKTIVTRINDISHTQSVSSKQKVTGLDFIPGLHPILTLSKMDQTLAVYQQILTSMPSRNVIQISNDLENLRDLLHVLAFSKSCHLPWASGLETLDSLGGVLEASGYSTEVVALSRLQGSLQDMLWQLDLSPGCGGGGSGGGGSGGGGSGGNGTGGGGSVPIQKVQDDTKTLIKTIVTRINDISHTQSVSSKQKVTGLDFIPGLHPILTLSKMDQTLAVYQQILTSMPSRNVIQISNDLENLRDLLHVLAFSKSCHLPWASGLETLDSLGGVLEASGYSTEVVALSRLQGSLQDMLWQLDLSPGC

SEQ ID NO: 284 - protein, 507 aa, Artificial
  synthesized leptin fusion protein
MICQKFCVVLLHWEFIYVITARVFTTQDVIYFPPKILTSVGSNVSFHCIYKKENKIVPSKEIVWWMNLAEKIPQSQYDVVSDHVSKVTFFNLNETKPRGKFTYDAVYCCNEHECHHRYAELYVIDVNINISCETDGYLTKMTCRWSTSTIQSLAESTLQLRYHRSSLYCSDIPSIHPISEPKDCYLQSDGFYECIFQPIFLLSGYTMWIRINHSLGSLDSPPTCVLPDSVVKPLPPSSVKAEITINIGLLKISWEKPVFPENNLQFQIRYGLSGKEVQWKMYEVYDAKSKSVSLPVPDLCAVYAVQVRCKRLDGLGYWSNWSNPAYTVVMDGGGGSGGGGSGGGGSGGNGTGGGGSGGGGSVPIQKVQDDTKTLIKTIVTRINDISHTQSVSSKQKVTGLDFIPGLHPILTLSKMDQTLAVYQQILTSMPSRNVIQISNDLENLRDLLHVLAFSKSCHLPWASGLETLDSLGGVLEASGYSTEVVALSRLQGSLQDMLWQLDLSPGC

SEQ ID NO: 285 - protein, 407 aa, Artificial
  synthesized leptin fusion protein
MICQKFCVVLLHWEFIYVITARVFTTQDVIYFPPKILTSVGSNVSFHCIYKKENKIVPSKEIVWWMNLAEKIPQSQYDVVSDHVSKVTFFNLNETKPRGKFTYDAVYCCNEHECHHRYAELYVIDVNINISCETDGYLTKMTCRWSTSTIQSLAESTLQLRYHRSSLYCSDIPSIHPISEPKDCYLQSDGFYECIFQPIFLLSGYTMWIRINHSLGSLDSPPTCVLPDSVVGGGGSGGGGSGGGGSGGNGTGGGGSGGGGSVPIQKVQDDTKTLIKTIVTRINDISHTQSVSSKQKVTGLDFIPGLHPILTLSKMDQTLAVYQQILTSMPSRNVIQISNDLENLRDLLHVLAFSKSCHLPWASGLETLDSLGGVLEASGYSTEVVALSRLQGSLQDMLWQLDLSPGC

SEQ ID NO: 286 - protein, 711 aa, Artificial
  synthesized leptin fusion protein
MHWGTLCGFLWLWPYLFYVQAVPIQKVQDDTKTLIKTIVTRINDISHTQSVSSKQKVTGLDFIPGLHPILTLSKMDQTLAVYQQILTSMPSRNVIQISNDLENLRDLLHVLAFSKSCHLPWASGLETLDSLGGVLEASGYSTEVVALSRLQGSLQDMLWQLDLSPGCGGGGSGGGGSGGGGSGGNGTGGGGSGGGGSRVFTTQDVIYFPPKILTSVGSNVSFHCIYKKENKIVPSKEIVWWMNLAEKIPQSQYDVVSDHVSKVTFFNLNETKPRGKFTYDAVYCCNEHECHHRYAELYVIDVNINISCETDGYLTKMTCRWSTSTIQSLAESTLQLRYHRSSLYCSDIPSIHPISEPKDCYLQSDGFYECIFQPIFLLSGYTMWIRINHSLGSLDSPPTCVLPDSVVKPLPPSSVKAEITINIGLLKISWEKPVFPENNLQFQIRYGLSGKEVQWKMYEVYDAKSKSVSLPVPDLCAVYAVQVRCKRLDGLGYWSNWSNPAYTVVMDIKVPMRGPEFWRIINGDTMKKEKNVTLLWKPLMKNDSLCSVQRYVINHHTSCNGTWSEDVGNHTKFTFLWTEQAHTVTVLAINSIGASVANFNLTFSWPMSKVNIVQSLSAYPLNSSCVIVSWILSPSDYKLMYFIIEWKNLNEDGEIKWLRISSSVKKYYIHDHFIPIEKYQFSLYPIFMEGVGKPKIINSFTQDDIEKHQSD

SEQ ID NO: 287 - protein, 771 aa, Artificial
  synthesized leptin fusion protein
MICQKFCVVLLHWEFIYVITAGHYETAVEPKFNSSGTHFSNLSKTTFHCCFRSEQDRNCSLCADNIEGKTFVSTVNSLVFQQIDANWNIQCWLKGDLKLFICYVESLFKNLFRNYNYKVHLLYVLPEVLEDSPLVPQKGSFQMVHCNCSVHECCECLVPVPTAKLNDTLLMCLKITSGGVIFQSPLMSVQPINMVKPDPPLGLHMEITDDGNLKISWSSPPLVPFPLQYQVKYSENSTTVIREADKIVSATSLLVDSILPGSSYEVQVRGKRLDGPGIWSDWSTPRVFTTQDVIYFPPKILTSVGSNVSFHCIYKKENKIVPSKEIVWWMNLAEKIPQSQYDVVSDHVSKVTFFNLNETKPRGKFTYDAVYCCNEHECHHRYAELYVIDVNINISCETDGYLTKMTCRWSTSTIQSLAESTLQLRYHRSSLYCSDIPSIHPISEPKDCYLQSDGFYECIFQPIFLLSGYTMWIRINHSLGSLDSPPTCVLPDSVVKPLPPSSVKAEITINIGLLKISWEKPVFPENNLQFQIRYGLSGKEVQWKMYEVYDAKSKSVSLPVPDLCAVYAVQVRCKRLDGLGYWSNWSNPAYTVVMDGGGGSGGGGSGGGGSGGNGTGGGGSGGGGSVPIQKVQDDTKTLIKTIVTRINDISHTQSVSSKQKVTGLDFIPGLHPILTLSKMDQTLAVYQQILTSMPSRNVIQISNDLENLRDLLHVLAFSKSCHLPWASGLETLDSLGGVLEASGYSTEVVALSRLQGSLQDMLWQLDLSPGC

SEQ ID NO: 288 - protein, 400 aa, Artificial
  synthesized leptin fusion protein
MHWGTLCGFLWLWPYLFYVQAVPIQKVQDDTKTLIKTIVTRINDISHTQSVSSKQKVTGLDFIPGLHPILTLSKMDQTLAVYQQILTSMPSRNVIQISNDLENLRDLLHVLAFSKSCHLPWASGLETLDSLGGVLEASGYSTEVVALSRLQGSLQDMLWQLDLSPGCGGGGSGGGGSGGGGSGWNGSGGGGSIDVNINISCETDGYLTKMTCRWSTSTIQSLAESTLQLRYHRSSLYCSDIPSIHPISEPKDCYLQSDGFYECIFQPIFLLSGYTMWIRINHSLGSLDSPPTCVLPDSVVKPLPPSSVKAEITINIGLLKISWEKPVFPENNLQFQIRYGLSGKEVQWKMYEVYDAKSKSVSLPVPDLCAVYAVQVRCKRLDGLGYWSNWSNPAYTVVMD

SEQ ID NO: 289 - protein, 379 aa, Artificial
  synthesized leptin fusion protein
VPIQKVQDDTKTLIKTIVTRINDISHTQSVSSKQKVTGLDFIPGLHPILTLSKMDQTLAVYQQILTSMPSRNVIQISNDLENLRDLLHVLAFSKSCHLPWASGLETLDSLGGVLEASGYSTEVVALSRLQGSLQDMLWQLDLSPGCGGGGSGGGGSGGGGSGWNGSGGGGSIDVNINISCETDGYLTKMTCRWSTSTIQSLAESTLQLRYHRSSLYCSDIPSIHPISEPKDCYLQSDGFYECIFQPIFLLSGYTMWIRINHSLGSLDSPPTCVLPDSVVKPLPPSSVKAEITINIGLLKISWEKPVFPENNLQFQIRYGLSGKEVQWKMYEVYDAKSKSVSLPVPDLCAVYAVQVRCKRLDGLGYWSNWSNPAYTVVMD

SEQ ID NO: 290 - protein, 1010 aa, Artificial
  synthesized leptin fusion protein
MHWGTLCGFLWLWPYLFYVQAVPIQKVQDDTKTLIKTIVTRINDISHTQSVSSKQKVTGLDFIPGLHPILTLSKMDQTLAVYQQILTSMPSRNVIQISNDLENLRDLLHVLAFSKSCHLPWASGLETLDSLGGVLEASGYSTEVVALSRLQGSLQDMLWQLDLSPGCGGGGSGGGGSGGGGSGWNGSGGGGSFNLSYPITPWRFKLSCMPPNSTYDYFLLPAGLSKNTSNSNGHYETAVEPKFNSSGTHFSNLSKTTFHCCFRSEQDRNCSLCADNIEGKTFVSTVNSLVFQQIDANWNIQCWLKGDLKLFICYVESLFKNLFRNYNYKVHLLYVLPEVLEDSPLVPQKGSFQMVHCNCSVHECCECLVPVPTAKLNDTLLMCLKITSGGVIFQSPLMSVQPINMVKPDPPLGLHMEITDDGNLKISWSSPPLVPFPLQYQVKYSENSTTVIREADKIVSATSLLVDSILPGSSYEVQVRGKRLDGPGIWSDWSTPRVFTTQDVIYFPPKILTSVGSNVSFHCIYKKENKIVPSKEIVWWMNLAEKIPQSQYDVVSDHVSKVTFFNLNETKPRGKFTYDAVYCCNEHECHHRYAELYVIDVNINISCETDGYLTKMTCRWSTSTIQSLAESTLQLRYHRSSLYCSDIPSIHPISEPKDCYLQSDGFYECIFQPIFLLSGYTMWIRINHSLGSLDSPPTCVLPDSVVKPLPPSSVKAEITINIGLLKISWEKPVFPENNLQFQIRYGLSGKEVQWKMYEVYDAKSKSVSLPVPDLCAVYAVQVRCKRLDGLGYWSNWSNPAYTVVMDIKVPMRGPEFWRIINGDTMKKEKNVTLLWKPLMKNDSLCSVQRYVINHHTSCNGTWSEDVGNHTKFTFLWTEQAHTVTVLAINSIGASVANFNLTFSWPMSKVNIVQSLSAYPLNSSCVIVSWILSPSDYKLMYFIIEWKNLNEDGEIKWLRISSSVKKYYIHDHFIPIEKYQFSLYPIFMEGVGKPKIINSFTQDDIEKHQSD

SEQ ID NO: 291 - protein, 1181 aa, Artificial
  synthesized leptin fusion protein
MHWGTLCGFLWLWPYLFYVQAVPIQKVQDDTKTLIKTIVTRINDISHTQSVSSKQKVTGLDFIPGLHPILTLSKMDQTLAVYQQILTSMPSRNVIQISNDLENLRDLLHVLAFSKSCHLPWASGLETLDSLGGVLEASGYSTEVVALSRLQGSLQDMLWQLDLSPGCGGGGSGGGGSGGGGSGWNGSGGGGSVPIQKVQDDTKTLIKTIVTRINDISHTQSVSSKQKVTGLDFIPGLHPILTLSKMDQTLAVYQQILTSMPSRNVIQISNDLENLRDLLHVLAFSKSCHLPWASGLETLDSLGGVLEASGYSTEVVALSRLQGSLQDMLWQLDLSPGCGGGGSGGGGSGGGGSGWNGSGGGGSFNLSYPITPWRFKLSCMPPNSTYDYFLLPAGLSKNTSNSNGHYETAVEPKFNSSGTHFSNLSKTTFHCCFRSEQDRNCSLCADNIEGKTFVSTVNSLVFQQIDANWNIQCWLKGDLKLFICYVESLFKNLFRNYNYKVHLLYVLPEVLEDSPLVPQKGSFQMVHCNCSVHECCECLVPVPTAKLNDTLLMCLKITSGGVIFQSPLMSVQPINMVKPDPPLGLHMEITDDGNLKISWSSPPLVPFPLQYQVKYSENSTTVIREADKIVSATSLLVDSILPGSSYEVQVRGKRLDGPGIWSDWSTPRVFTTQDVIYFPPKILTSVGSNVSFHCIYKKENKIVPSKEIVWWMNLAEKIPQSQYDVVSDHVSKVTFFNLNETKPRGKFTYDAVYCCNEHECHHRYAELYVIDVNINISCETDGYLTKMTCRWSTSTIQSLAESTLQLRYHRSSLYCSDIPSIHPISEPKDCYLQSDGFYECIFQPIFLLSGYTMWIRINHSLGSLDSPPTCVLPDSVVKPLPPSSVKAEITINIGLLKISWEKPVFPENNLQFQIRYGLSGKEVQWKMYEVYDAKSKSVSLPVPDLCAVYAVQVRCKRLDGLGYWSNWSNPAYTVVMDIKVPMRGPEFWRIINGDTMKKEKNVTLLWKPLMKNDSLCSVQRYVINHHTSCNGTWSEDVGNHTKFTFLWTEQAHTVTVLAINSIGASVANFNLTFSWPMSKVNIVQSLSAYPLNSSCVIVSWILSPSDYKLMYFIIEWKNLNEDGEIKWLRISSSVKKYYIHDHFIPIEKYQFSLYPIFMEGVGKPKIINSFTQDDIEKHQSD

SEQ ID NO: 292 - protein, 507 aa, Artificial
  synthesized leptin fusion protein
MHWGTLCGFLWLWPYLFYVQAVPIQKVQDDTKTLIKTIVTRINDISHTQSVSSKQKVTGLDFIPGLHPILTLSKMDQTLAVYQQILTSMPSRNVIQISNDLENLRDLLHVLAFSKSCHLPWASGLETLDSLGGVLEASGYSTEVVALSRLQGSLQDMLWQLDLSPGCGGGGSGGGGSGGGGSGWNGSGGGGSGGGGSRVFTTQDVIYFPPKILTSVGSNVSFHCIYKKENKIVPSKEIVWWMNLAEKIPQSQYDVVSDHVSKVTFFNLNETKPRGKFTYDAVYCCNEHECHHRYAELYVIDVNINISCETDGYLTKMTCRWSTSTIQSLAESTLQLRYHRSSLYCSDIPSIHPISEPKDCYLQSDGFYECIFQPIFLLSGYTMWIRINHSLGSLDSPPTCVLPDSVVKPLPPSSVKAEITINIGLLKISWEKPVFPENNLQFQIRYGLSGKEVQWKMYEVYDAKSKSVSLPVPDLCAVYAVQVRCKRLDGLGYWSNWSNPAYTVVMD

SEQ ID NO: 293 - protein, 407 aa, Artificial
  synthesized leptin fusion protein
MHWGTLCGFLWLWPYLFYVQAVPIQKVQDDTKTLIKTIVTRINDISHTQSVSSKQKVTGLDFIPGLHPILTLSKMDQTLAVYQQILTSMPSRNVIQISNDLENLRDLLHVLAFSKSCHLPWASGLETLDSLGGVLEASGYSTEVVALSRLQGSLQDMLWQLDLSPGCGGGGSGGGGSGGGGSGWNGSGGGGSGGGGSRVFTTQDVIYFPPKILTSVGSNVSFHCIYKKENKIVPSKEIVWWMNLAEKIPQSQYDVVSDHVSKVTFFNLNETKPRGKFTYDAVYCCNEHECHHRYAELYVIDVNINISCETDGYLTKMTCRWSTSTIQSLAESTLQLRYHRSSLYCSDIPSIHPISEPKDCYLQSDGFYECIFQPIFLLSGYTMWIRINHSLGSLDSPPTCVLPDSVV

SEQ ID NO: 294 - protein, 405 aa, Artificial
  synthesized leptin fusion protein
MICQKFCVVLLHWEFIYVITAIDVNINISCETDGYLTKMTCRWSTSTIQSLAESTLQLRYHRSSLYCSDIPSIHPISEPKDCYLQSDGFYECIFQPIFLLSGYTMWIRINHSLGSLDSPPTCVLPDSVVKPLPPSSVKAEITINIGLLKISWEKPVFPENNLQFQIRYGLSGKEVQWKMYEVYDAKSKSVSLPVPDLCAVYAVQVRCKRLDGLGYWSNWSNPAYTVVMDGGGGSGGGGSGGGGSGWNGSGGGGSGGGGSVPIQKVQDDTKTLIKTIVTRINDISHTQSVSSKQKVTGLDFIPGLHPILTLSKMDQTLAVYQQILTSMPSRNVIQISNDLENLRDLLHVLAFSKSCHLPWASGLETLDSLGGVLEASGYSTEVVALSRLQGSLQDMLWQLDLSPGC

SEQ ID NO: 295 - protein, 1015 aa, Artificial
  synthesized leptin fusion protein
MICQKFCVVLLHWEFIYVITAFNLSYPITPWRFKLSCMPPNSTYDYFLLPAGLSKNTSNSNGHYETAVEPKFNSSGTHFSNLSKTTFHCCFRSEQDRNCSLCADNIEGKTFVSTVNSLVFQQIDANWNIQCWLKGDLKLFICYVESLFKNLFRNYNYKVHLLYVLPEVLEDSPLVPQKGSFQMVHCNCSVHECCECLVPVPTAKLNDTLLMCLKITSGGVIFQSPLMSVQPINMVKPDPPLGLHMEITDDGNLKISWSSPPLVPFPLQYQVKYSENSTTVIREADKIVSATSLLVDSILPGSSYEVQVRGKRLDGPGIWSDWSTPRVFTTQDVIYFPPKILTSVGSNVSFHCIYKKENKIVPSKEIVWWMNLAEKIPQSQYDVVSDHVSKVTFFNLNETKPRGKFTYDAVYCCNEHECHHRYAELYVIDVNINISCETDGYLTKMTCRWSTSTIQSLAESTLQLRYHRSSLYCSDIPSIHPISEPKDCYLQSDGFYECIFQPIFLLSGYTMWIRINHSLGSLDSPPTCVLPDSVVKPLPPSSVKAEITINIGLLKISWEKPVFPENNLQFQIRYGLSGKEVQWKMYEVYDAKSKSVSLPVPDLCAVYAVQVRCKRLDGLGYWSNWSNPAYTVVMDIKVPMRGPEFWRIINGDTMKKEKNVTLLWKPLMKNDSLCSVQRYVINHHTSCNGTWSEDVGNHTKFTFLWTEQAHTVTVLAINSIGASVANFNLTFSWPMSKVNIVQSLSAYPLNSSCVIVSWILSPSDYKLMYFIIEWKNLNEDGEIKWLRISSSVKKYYIHDHFIPIEKYQFSLYPIFMEGVGKPKIINSFTQDDIEKHQSDGGGGSGGGGSGGGGSGWNGSGGGGSGGGGSVPIQKVQDDTKTLIKTIVTRINDISHTQSVSSKQKVTGLDFIPGLHPILTLSKMDQTLAVYQQILTSMPSRNVIQISNDLENLRDLLHVLAFSKSCHLPWASGLETLDSLGGVLEASGYSTEVVALSRLQGSLQDMLWQLDLSPGC

SEQ ID NO: 296 - protein, 1181 aa, Artificial
  synthesized leptin fusion protein
MICQKFCVVLLHWEFIYVITAFNLSYPITPWRFKLSCMPPNSTYDYFLLPAGLSKNTSNSNGHYETAVEPKFNSSGTHFSNLSKTTFHCCFRSEQDRNCSLCADNIEGKTFVSTVNSLVFQQIDANWNIQCWLKGDLKLFICYVESLFKNLFRNYNYKVHLLYVLPEVLEDSPLVPQKGSFQMVHCNCSVHECCECLVPVPTAKLNDTLLMCLKITSGGVIFQSPLMSVQPINMVKPDPPLGLHMEITDDGNLKISWSSPPLVPFPLQYQVKYSENSTTVIREADKIVSATSLLVDSILPGSSYEVQVRGKRLDGPGIWSDWSTPRVFTTQDVIYFPPKILTSVGSNVSFHCIYKKENKIVPSKEIVWWMNLAEKIPQSQYDVVSDHVSKVTFFNLNETKPRGKFTYDAVYCCNEHECHHRYAELYVIDVNINISCETDGYLTKMTCRWSTSTIQSLAESTLQLRYHRSSLYCSDIPSIHPISEPKDCYLQSDGFYECIFQPIFLLSGYTMWIRINHSLGSLDSPPTCVLPDSVVKPLPPSSVKAEITINIGLLKISWEKPVFPENNLQFQIRYGLSGKEVQWKMYEVYDAKSKSVSLPVPDLCAVYAVQVRCKRLDGLGYWSNWSNPAYTVVMDIKVPMRGPEFWRIINGDTMKKEKNVTLLWKPLMKNDSLCSVQRYVINHHTSCNGTWSEDVGNHTKFTFLWTEQAHTVTVLAINSIGASVANFNLTFSWPMSKVNIVQSLSAYPLNSSCVIVSWILSPSDYKLMYFIIEWKNLNEDGEIKWLRISSSVKKYYIHDHFIPIEKYQFSLYPIFMEGVGKPKIINSFTQDDIEKHQSDGGGGSGGGGSGGGGSGWNGSGGGGSVPIQKVQDDTKTLIKTIVTRINDISHTQSVSSKQKVTGLDFIPGLHPILTLSKMDQTLAVYQQILTSMPSRNVIQISNDLENLRDLLHVLAFSKSCHLPWASGLETLDSLGGVLEASGYSTEVVALSRLQGSLQDMLWQLDLSPGCGGGGSGGGGSGGGGSGWNGSGGGGSVPIQKVQDDTKTLIKTIVTRINDISHTQSVSSKQKVTGLDFIPGLHPILTLSKMDQTLAVYQQILTSMPSRNVIQISNDLENLRDLLHVLAFSKSCHLPWASGLETLDSLGGVLEASGYSTEVVALSRLQGSLQDMLWQLDLSPGC

SEQ ID NO: 297 - protein, 507 aa, Artificial
  synthesized leptin fusion protein
MICQKFCVVLLHWEFIYVITARVFTTQDVIYFPPKILTSVGSNVSFHCIYKKENKIVPSKEIVWWMNLAEKIPQSQYDVVSDHVSKVTFFNLNETKPRGKFTYDAVYCCNEHECHHRYAELYVIDVNINISCETDGYLTKMTCRWSTSTIQSLAESTLQLRYHRSSLYCSDIPSIHPISEPKDCYLQSDGFYECIFQPIFLLSGYTMWIRINHSLGSLDSPPTCVLPDSVVKPLPPSSVKAEITINIGLLKISWEKPVFPENNLQFQIRYGLSGKEVQWKMYEVYDAKSKSVSLPVPDLCAVYAVQVRCKRLDGLGYWSNWSNPAYTVVMDGGGGSGGGGSGGGGSGWNGSGGGGSGGGGSVPIQKVQDDTKTLIKTIVTRINDISHTQSVSSKQKVTGLDFIPGLHPILTLSKMDQTLAVYQQILTSMPSRNVIQISNDLENLRDLLHVLAFSKSCHLPWASGLETLDSLGGVLEASGYSTEVVALSRLQGSLQDMLWQLDLSPGC

SEQ ID NO: 298 - protein, 407 aa, Artificial
  synthesized leptin fusion protein
MICQKFCVVLLHWEFIYVITARVFTTQDVIYFPPKILTSVGSNVSFHCIYKKENKIVPSKEIVWWMNLAEKIPQSQYDVVSDHVSKVTFFNLNETKPRGKFTYDAVYCCNEHECHHRYAELYVIDVNINISCETDGYLTKMTCRWSTSTIQSLAESTLQLRYHRSSLYCSDIPSIHPISEPKDCYLQSDGFYECIFQPIFLLSGYTMWIRINHSLGSLDSPPTCVLPDSVVGGGGSGGGGSGGGGSGWNGSGGGGSGGGGSVPIQKVQDDTKTLIKTIVTRINDISHTQSVSSKQKVTGLDFIPGLHPILTLSKMDQTLAVYQQILTSMPSRNVIQISNDLENLRDLLHVLAFSKSCHLPWASGLETLDSLGGVLEASGYSTEVVALSRLQGSLQDMLWQLDLSPGC

SEQ ID NO: 299 - protein, 711 aa, Artificial
  synthesized leptin fusion protein
MHWGTLCGFLWLWPYLFYVQAVPIQKVQDDTKTLIKTIVTRINDISHTQSVSSKQKVTGLDFIPGLHPILTLSKMDQTLAVYQQILTSMPSRNVIQISNDLENLRDLLHVLAFSKSCHLPWASGLETLDSLGGVLEASGYSTEVVALSRLQGSLQDMLWQLDLSPGCGGGGSGGGGSGGGGSGWNGSGGGGSGGGGSRVFTTQDVIYFPPKILTSVGSNVSFHCIYKKENKIVPSKEIVWWMNLAEKIPQSQYDVVSDHVSKVTFFNLNETKPRGKFTYDAVYCCNEHECHHRYAELYVIDVNINISCETDGYLTKMTCRWSTSTIQSLAESTLQLRYHRSSLYCSDIPSIHPISEPKDCYLQSDGFYECIFQPIFLLSGYTMWIRINHSLGSLDSPPTCVLPDSVVKPLPPSSVKAEITINIGLLKISWEKPVFPENNLQFQIRYGLSGKEVQWKMYEVYDAKSKSVSLPVPDLCAVYAVQVRCKRLDGLGYWSNWSNPAYTVVMDIKVPMRGPEFWRIINGDTMKKEKNVTLLWKPLMKNDSLCSVQRYVINHHTSCNGTWSEDVGNHTKFTFLWTEQAHTVTVLAINSIGASVANFNLTFSWPMSKVNIVQSLSAYPLNSSCVIVSWILSPSDYKLMYFIIEWKNLNEDGEIKWLRISSSVKKYYIHDHFIPIEKYQFSLYPIFMEGVGKPKIINSFTQDDIEKHQSD

SEQ ID NO: 300 - protein, 771 aa, Artificial
  synthesized leptin fusion protein
MICQKFCVVLLHWEFIYVITAGHYETAVEPKFNSSGTHFSNLSKTTFHCCFRSEQDRNCSLCADNIEGKTFVSTVNSLVFQQIDANWNIQCWLKGDLKLFICYVESLFKNLFRNYNYKVHLLYVLPEVLEDSPLVPQKGSFQMVHCNCSVHECCECLVPVPTAKLNDTLLMCLKITSGGVIFQSPLMSVQPINMVKPDPPLGLHMEITDDGNLKISWSSPPLVPFPLQYQVKYSENSTTVIREADKIVSATSLLVDSILPGSSYEVQVRGKRLDGPGIWSDWSTPRVFTTQDVIYFPPKILTSVGSNVSFHCIYKKENKIVPSKEIVWWMNLAEKIPQSQYDVVSDHVSKVTFFNLNETKPRGKFTYDAVYCCNEHECHHRYAELYVIDVNINISCETDGYLTKMTCRWSTSTIQSLAESTLQLRYHRSSLYCSDIPSIHPISEPKDCYLQSDGFYECIFQPIFLLSGYTMWIRINHSLGSLDSPPTCVLPDSVVKPLPPSSVKAEITINIGLLKISWEKPVFPENNLQFQIRYGLSGKEVQWKMYEVYDAKSKSVSLPVPDLCAVYAVQVRCKRLDGLGYWSNWSNPAYTVVMDGGGGSGGGGSGGGGSGWNGSGGGGSGGGGSVPIQKVQDDTKTLIKTIVTRINDISHTQSVSSKQKVTGLDFIPGLHPILTLSKMDQTLAVYQQILTSMPSRNVIQISNDLENLRDLLHVLAFSKSCHLPWASGLETLDSLGGVLEASGYSTEVVALSRLQGSLQDMLWQLDLSPGC

SEQ ID NO: 301 - protein, 403 aa, Artificial
  synthesized leptin fusion protein
MHWGTLCGFLWLWPYLFYVQAVPIQKVQDDTKTLIKTIVTRINDISHTQSVSSKQKVTGLDFIPGLHPILTLSKMDQTLAVYQQILTSMPSRNVIQISNDLENLRDLLHVLAFSKSCHLPWASGLETLDSLGGVLEASGYSTEVVALSRLQGSLQDMLWQLDLSPGCGGGGSGGGGSGGGGSGGGGSNATGGGGSIDVNINISCETDGYLTKMTCRWSTSTIQSLAESTLQLRYHRSSLYCSDIPSIHPISEPKDCYLQSDGFYECIFQPIFLLSGYTMWIRINHSLGSLDSPPTCVLPDSVVKPLPPSSVKAEITINIGLLKISWEKPVFPENNLQFQIRYGLSGKEVQWKMYEVYDAKSKSVSLPVPDLCAVYAVQVRCKRLDGLGYWSNWSNPAYTVVMD

SEQ ID NO: 302 - protein, 382 aa, Artificial
  synthesized leptin fusion protein
VPIQKVQDDTKTLIKTIVTRINDISHTQSVSSKQKVTGLDFIPGLHPILTLSKMDQTLAVYQQILTSMPSRNVIQISNDLENLRDLLHVLAFSKSCHLPWASGLETLDSLGGVLEASGYSTEVVALSRLQGSLQDMLWQLDLSPGCGGGGSGGGGSGGGGSGGGGSNATGGGGSIDVNINISCETDGYLTKMTCRWSTSTIQSLAESTLQLRYHRSSLYCSDIPSIHPISEPKDCYLQSDGFYECIFQPIFLLSGYTMWIRINHSLGSLDSPPTCVLPDSVVKPLPPSSVKAEITINIGLLKISWEKPVFPENNLQFQIRYGLSGKEVQWKMYEVYDAKSKSVSLPVPDLCAVYAVQVRCKRLDGLGYWSNWSNPAYTVVMD

SEQ ID NO: 303 - protein, 1013 aa, Artificial
  synthesized leptin fusion protein
MHWGTLCGFLWLWPYLFYVQAVPIQKVQDDTKTLIKTIVTRINDISHTQSVSSKQKVTGLDFIPGLHPILTLSKMDQTLAVYQQILTSMPSRNVIQISNDLENLRDLLHVLAFSKSCHLPWASGLETLDSLGGVLEASGYSTEVVALSRLQGSLQDMLWQLDLSPGCGGGGSGGGGSGGGGSGGGGSNATGGGGSFNLSYPITPWRFKLSCMPPNSTYDYFLLPAGLSKNTSNSNGHYETAVEPKFNSSGTHFSNLSKTTFHCCFRSEQDRNCSLCADNIEGKTFVSTVNSLVFQQIDANWNIQCWLKGDLKLFICYVESLFKNLFRNYNYKVHLLYVLPEVLEDSPLVPQKGSFQMVHCNCSVHECCECLVPVPTAKLNDTLLMCLKITSGGVIFQSPLMSVQPINMVKPDPPLGLHMEITDDGNLKISWSSPPLVPFPLQYQVKYSENSTTVIREADKIVSATSLLVDSILPGSSYEVQVRGKRLDGPGIWSDWSTPRVFTTQDVIYFPPKILTSVGSNVSFHCIYKKENKIVPSKEIVWWMNLAEKIPQSQYDVVSDHVSKVTFFNLNETKPRGKFTYDAVYCCNEHECHHRYAELYVIDVNINISCETDGYLTKMTCRWSTSTIQSLAESTLQLRYHRSSLYCSDIPSIHPISEPKDCYLQSDGFYECIFQPIFLLSGYTMWIRINHSLGSLDSPPTCVLPDSVVKPLPPSSVKAEITINIGLLKISWEKPVFPENNLQFQIRYGLSGKEVQWKMYEVYDAKSKSVSLPVPDLCAVYAVQVRCKRLDGLGYWSNWSNPAYTVVMDIKVPMRGPEFWRIINGDTMKKEKNVTLLWKPLMKNDSLCSVQRYVINHHTSCNGTWSEDVGNHTKFTFLWTEQAHTVTVLAINSIGASVANFNLTFSWPMSKVNIVQSLSAYPLNSSCVIVSWILSPSDYKLMYFIIEWKNLNEDGEIKWLRISSSVKKYYIHDHFIPIEKYQFSLYPIFMEGVGKPKIINSFTQDDIEKHQSD

SEQ ID NO: 304 - protein, 1187 aa, Artificial [sequence omitted]

SEQ ID NO: 305 - protein, 510 aa, Artificial
  synthesized leptin fusion protein
MHWGTLCGFLWLWPYLFYVQAVPIQKVQDDTKTLIKTIVTRINDISHTQSVSSKQKVTGLDFIPGLHPILTLSKMDQTLAVYQQILTSMPSRNVIQISNDLENLRDLLHVLAFSKSCHLPWASGLETLDSLGGVLEASGYSTEVVALSRLQGSLQDMLWQLDLSPGCGGGGSGGGGSGGGGSGGGGSNATGGGGSGGGGSRVFTTQDVIYFPPKILTSVGSNVSFHCIYKKENKIVPSKEIVWWMNLAEKIPQSQYDVVSDHVSKVTFFNLNETKPRGKFTYDAVYCCNEHECHHRYAELYVIDVNINISCETDGYLTKMTCRWSTSTIQSLAESTLQLRYHRSSLYCSDIPSIHPISEPKDCYLQSDGFYECIFQPIFLLSGYTMWIRINHSLGSLDSPPTCVLPDSVVKPLPPSSVKAEITINIGLLKISWEKPVFPENNLQFQIRYGLSGKEVQWKMYEVYDAKSKSVSLPVPDLCAVYAVQVRCKRLDGLGYWSNWSNPAYTVVMD

SEQ ID NO: 306 - protein, 410 aa, Artificial
  synthesized leptin fusion protein
MHWGTLCGFLWLWPYLFYVQAVPIQKVQDDTKTLIKTIVTRINDISHTQSVSSKQKVTGLDFIPGLHPILTLSKMDQTLAVYQQILTSMPSRNVIQISNDLENLRDLLHVLAFSKSCHLPWASGLETLDSLGGVLEASGYSTEVVALSRLQGSLQDMLWQLDLSPGCGGGGSGGGGSGGGGSGGGGSNATGGGGSGGGGSRVFTTQDVIYFPPKILTSVGSNVSFHCIYKKENKIVPSKEIVWWMNLAEKIPQSQYDVVSDHVSKVTFFNLNETKPRGKFTYDAVYCCNEHECHHRYAELYVIDVNINISCETDGYLTKMTCRWSTSTIQSLAESTLQLRYHRSSLYCSDIPSIHPISEPKDCYLQSDGFYECIFQPIFLLSGYTMWIRINHSLGSLDSPPTCVLPDSVV

SEQ ID NO: 307 - protein, 408 aa, Artificial
  synthesized leptin fusion protein
MICQKFCVVLLHWEFIYVITAIDVNINISCETDGYLTKMTCRWSTSTIQSLAESTLQLRYHRSSLYCSDIPSIHPISEPKDCYLQSDGFYECIFQPIFLLSGYTMWIRINHSLGSLDSPPTCVLPDSVVKPLPPSSVKAEITINIGLLKISWEKPVFPENNLQFQIRYGLSGKEVQWKMYEVYDAKSKSVSLPVPDLCAVYAVQVRCKRLDGLGYWSNWSNPAYTVVMDGGGGSGGGGSGGGGSGGGGSNATGGGGSGGGGSVPIQKVQDDTKTLIKTIVTRINDISHTQSVSSKQKVTGLDFIPGLHPILTLSKMDQTLAVYQQILTSMPSRNVIQISNDLENLRDLLHVLAFSKSCHLPWASGLETLDSLGGVLEASGYSTEVVALSRLQGSLQDMLWQLDLSPGC

SEQ ID NO: 308 - protein, 1018 aa, Artificial
  synthesized leptin fusion protein
MICQKFCVVLLHWEFIYVITAFNLSYPITPWRFKLSCMPPNSTYDYFLLPAGLSKNTSNSNGHYETAVEPKFNSSGTHFSNLSKTTFHCCFRSEQDRNCSLCADNIEGKTFVSTVNSLVFQQIDANWNIQCWLKGDLKLFICYVESLFKNLFRNYNYKVHLLYVLPEVLEDSPLVPQKGSFQMVHCNCSVHECCECLVPVPTAKLNDTLLMCLKITSGGVIFQSPLMSVQPINMVKPDPPLGLHMEITDDGNLKISWSSPPLVPFPLQYQVKYSENSTTVIREADKIVSATSLLVDSILPGSSYEVQVRGKRLDGPGIWSDWSTPRVFTTQDVIYFPPKILTSVGSNVSFHCIYKKENKIVPSKEIVWWMNLAEKIPQSQYDVVSDHVSKVTFFNLNETKPRGKFTYDAVYCCNEHECHHRYAELYVIDVNINISCETDGYLTKMTCRWSTSTIQSLAESTLQLRYHRSSLYCSDIPSIHPISEPKDCYLQSDGFYECIFQPIFLLSGYTMWIRINHSLGSLDSPPTCVLPDSVVKPLPPSSVKAEITINIGLLKISWEKPVFPENNLQFQIRYGLSGKEVQWKMYEVYDAKSKSVSLPVPDLCAVYAVQVRCKRLDGLGYWSNWSNPAYTVVMDIKVPMRGPEFWRIINGDTMKKEKNVTLLWKPLMKNDSLCSVQRYVINHHTSCNGTWSEDVGNHTKFTFLWTEQAHTVTVLAINSIGASVANFNLTFSWPMSKVNIVQSLSAYPLNSSCVIVSWILSPSDYKLMYFIIEWKNLNEDGEIKWLRISSSVKKYYIHDHFIPIEKYQFSLYPIFMEGVGKPKIINSFTQDDIEKHQSDGGGGSGGGGSGGGGSGGGGSNATGGGGSGGGGSVPIQKVQDDTKTLIKTIVTRINDISHTQSVSSKQKVTGLDFIPGLHPILTLSKMDQTLAVYQQILTSMPSRNVIQISNDLENLRDLLHVLAFSKSCHLPWASGLETLDSLGGVLEASGYSTEVVALSRLQGSLQDMLWQLDLSPGC

SEQ ID NO: 309 - protein, 1187 aa, Artificial [sequence omitted]

SEQ ID NO: 310 - protein, 510 aa, Artificial
  synthesized leptin fusion protein
MICQKFCVVLLHWEFIYVITARVFTTQDVIYFPPKILTSVGSNVSFHCIYKKENKIVPSKEIVWWMNLAEKIPQSQYDVVSDHVSKVTFFNLNETKPRGKFTYDAVYCCNEHECHHRYAELYVIDVNINISCETDGYLTKMTCRWSTSTIQSLAESTLQLRYHRSSLYCSDIPSIHPISEPKDCYLQSDGFYECIFQPIFLLSGYTMWIRINHSLGSLDSPPTCVLPDSVVKPLPPSSVKAEITINIGLLKISWEKPVFPENNLQFQIRYGLSGKEVQWKMYEVYDAKSKSVSLPVPDLCAVYAVQVRCKRLDGLGYWSNWSNPAYTVVMDGGGGSGGGGSGGGGSGGGGSNATGGGGSGGGGSVPIQKVQDDTKTLIKTIVTRINDISHTQSVSSKQKVTGLDFIPGLHPILTLSKMDQTLAVYQQILTSMPSRNVIQISNDLENLRDLLHVLAFSKSCHLPWASGLETLDSLGGVLEASGYSTEVVALSRLQGSLQDMLWQLDLSPGC

SEQ ID NO: 311 - protein, 410 aa, Artificial
  synthesized leptin fusion protein
MICQKFCVVLLHWEFIYVITARVFTTQDVIYFPPKILTSVGSNVSFHCIYKKENKIVPSKEIVWWMNLAEKIPQSQYDVVSDHVSKVTFFNLNETKPRGKFTYDAVYCCNEHECHHRYAELYVIDVNINISCETDGYLTKMTCRWSTSTIQSLAESTLQLRYHRSSLYCSDIPSIHPISEPKDCYLQSDGFYECIFQPIFLLSGYTMWIRINHSLGSLDSPPTCVLPDSVVGGGGSGGGGSGGGGSGGGGSNATGGGGSGGGGSVPIQKVQDDTKTLIKTIVTRINDISHTQSVSSKQKVTGLDFIPGLHPILTLSKMDQTLAVYQQILTSMPSRNVIQISNDLENLRDLLHVLAFSKSCHLPWASGLETLDSLGGVLEASGYSTEVVALSRLQGSLQDMLWQLDLSPGC

SEQ ID NO: 312 - protein, 714 aa, Artificial
  synthesized leptin fusion protein
MHWGTLCGFLWLWPYLFYVQAVPIQKVQDDTKTLIKTIVTRINDISHTQSVSSKQKVTGLDFIPGLHPILTLSKMDQTLAVYQQILTSMPSRNVIQISNDLENLRDLLHVLAFSKSCHLPWASGLETLDSLGGVLEASGYSTEVVALSRLQGSLQDMLWQLDLSPGCGGGGSGGGGSGGGGSGGGGSNATGGGGSGGGGSRVFTTQDVIYFPPKILTSVGSNVSFHCIYKKENKIVPSKEIVWWMNLAEKIPQSQYDVVSDHVSKVTFFNLNETKPRGKFTYDAVYCCNEHECHHRYAELYVIDVNINISCETDGYLTKMTCRWSTSTIQSLAESTLQLRYHRSSLYCSDIPSIHPISEPKDCYLQSDGFYECIFQPIFLLSGYTMWIRINHSLGSLDSPPTCVLPDSVVKPLPPSSVKAEITINIGLLKISWEKPVFPENNLQFQIRYGLSGKEVQWKMYEVYDAKSKSVSLPVPDLCAVYAVQVRCKRLDGLGYWSNWSNPAYTVVMDIKVPMRGPEFWRIINGDTMKKEKNVTLLWKPLMKNDSLCSVQRYVINHHTSCNGTWSEDVGNHTKFTFLWTEQAHTVTVLAINSIGASVANFNLTFSWPMSKVNIVQSLSAYPLNSSCVIVSWILSPSDYKLMYFIIEWKNLNEDGEIKWLRISSSVKKYYIHDHFIPIEKYQFSLYPIFMEGVGKPKIINSFTQDDIEKHQSD

SEQ ID NO: 313 - protein, 774 aa, Artificial
  synthesized leptin fusion protein
MICQKFCVVLLHWEFIYVITAGHYETAVEPKFNSSGTHFSNLSKTTFHCCFRSEQDRNCSLCADNIEGKTFVSTVNSLVFQQIDANWNIQCWLKGDLKLFICYVESLFKNLFRNYNYKVHLLYVLPEVLEDSPLVPQKGSFQMVHCNCSVHECCECLVPVPTAKLNDTLLMCLKITSGGVIFQSPLMSVQPINMVKPDPPLGLHMEITDDGNLKISWSSPPLVPFPLQYQVKYSENSTTVIREADKIVSATSLLVDSILPGSSYEVQVRGKRLDGPGIWSDWSTPRVFTTQDVIYFPPKILTSVGSNVSFHCIYKKENKIVPSKEIVWWMNLAEKIPQSQYDVVSDHVSKVTFFNLNETKPRGKFTYDAVYCCNEHECHHRYAELYVIDVNINISCETDGYLTKMTCRWSTSTIQSLAESTLQLRYHRSSLYCSDIPSIHPISEPKDCYLQSDGFYECIFQPIFLLSGYTMWIRINHSLGSLDSPPTCVLPDSVVKPLPPSSVKAEITINIGLLKISWEKPVFPENNLQFQIRYGLSGKEVQWKMYEVYDAKSKSVSLPVPDLCAVYAVQVRCKRLDGLGYWSNWSNPAYTVVMDGGGGSGGGGSGGGGSGGGGSNATGGGGSGGGGSVPIQKVQDDTKTLIKTIVTRINDISHTQSVSSKQKVTGLDFIPGLHPILTLSKMDQTLAVYQQILTSMPSRNVIQISNDLENLRDLLHVLAFSKSCHLPWASGLETLDSLGGVLEASGYSTEVVALSRLQGSLQDMLWQLDLSPGC

SEQ ID NO: 314 - protein, 467 aa, Artificial
  synthesized prolactin fusion protein
MNIKGSPWKGSLLLLLVSNLLLCQSVAPLPICPGGAARCQVTLRDLFDRAVVLSHYIHNLSSEMFSEFDKRYTHGRGFITKAINSCHTSSLATPEDKEQAQQMNQKDFLSLIVSILRSWNEPLYHLVTEVRGMQEAPEAILSKAVEIEEQTKRLLEGMELIVSQVHPETKENEIYPVWSGLPSLQMADEESRLSAYYNLLHCLRRDSHKIDNYLKLLKCRIIHNNNCGGGGSGGGGSGGGGSGGNGSGGGGSGGGGSQLPPGKPEIFKCRSPNKETFTCWWRPGTDGGLPTNYSLTYHREGETLMHECPDYITGGPNSCHFGKQYTSMWRTYIMMVNATNQMGSSFSDELYVDVTYIVQPDPPLELAVEVKQPEDRKPYLWIKWSPPTLIDLKTGWFTLLYEIRLKPEKAAEWEIHFAGQQTEFKILSLHPGQKYLVQVRCKPDHGYWSAWSPATFIQIPSDFTMND

SEQ ID NO: 315 - protein, 467 aa, Artificial
  synthesized prolactin fusion protein
MNIKGSPWKGSLLLLLVSNLLLCQSVAPLPICPGGAARCQVTLRDLFDRAVVLSHYIHNLSSEMFSEFDKRYTHGRGFITKAINSCHTSSLATPEDKEQAQQMNQKDFLSLIVSILRSWNEPLYHLVTEVRGMQEAPEAILSKAVEIEEQTKRLLERMELIVSQVHPETKENEIYPVWSGLPSLQMADEESRLSAYYNLLHCLRRDSHKIDNYLKLLKCRIIHNNNCGGGGSGGGGSGGGGSGGNGSGGGGSGGGGSQLPPGKPEIFKCRSPNKETFTCWWRPGTDGGLPTNYSLTYHREGETLMHECPDYITGGPNSCHFGKQYTSMWRTYIMMVNATNQMGSSFSDELYVDVTYIVQPDPPLELAVEVKQPEDRKPYLWIKWSPPTLIDLKTGWFTLLYEIRLKPEKAAEWEIHFAGQQTEFKILSLHPGQKYLVQVRCKPDHGYWSAWSPATFIQIPSDFTMND

SEQ ID NO: 316 - protein, 458 aa, Artificial
  synthesized prolactin fusion protein
MNIKGSPWKGSLLLLLVSNLLLCQSVAPRSQVTLRDLFDRAVVLSHYIHNLSSEMFSEFDKRYTHGRGFITKAINSCHTSSLATPEDKEQAQQMNQKDFLSLIVSILRSWNEPLYHLVTEVRGMQEAPEAILSKAVEIEEQTKRLLERMELIVSQVHPETKENEIYPVWSGLPSLQMADEESRLSAYYNLLHCLRRDSHKIDNYLKLLKCRIIHNNNCGGGGSGGGGSGGGGSGGNGSGGGGSGGGGSQLPPGKPEIFKCRSPNKETFTCWWRPGTDGGLPTNYSLTYHREGETLMHECPDYITGGPNSCHFGKQYTSMWRTYIMMVNATNQMGSSFSDELYVDVTYIVQPDPPLELAVEVKQPEDRKPYLWIKWSPPTLIDLKTGWFTLLYEIRLKPEKAAEWEIHFAGQQTEFKILSLHPGQKYLVQVRCKPDHGYWSAWSPATFIQIPSDFTMND

SEQ ID NO: 317 - protein, 467 aa, Artificial
  synthesized prolactin fusion protein
MNIKGSPWKGSLLLLLVSNLLLCQSVAPLPICPGGAARCQVTLRDLFDRAVVLSHYIHNLSSEMFSEFDKRYTHGRGFITKAINSCHTSSLATPEDKEQAQQMNQKDFLSLIVSILRSWNEPLYHLVTEVRGMQEAPEAILSKAVEIEEQTKRLLEGMELIVSQVHPETKENEIYPVWSGLPSLQMADEESRLSAYYNLLHCLRRDSHKIDNYLKLLKCRIIHNNNCGGGGSGGGGSGGGGSGGNGTGGGGSGGGGSQLPPGKPEIFKCRSPNKETFTCWWRPGTDGGLPTNYSLTYHREGETLMHECPDYITGGPNSCHFGKQYTSMWRTYIMMVNATNQMGSSFSDELYVDVTYIVQPDPPLELAVEVKQPEDRKPYLWIKWSPPTLIDLKTGWFTLLYEIRLKPEKAAEWEIHFAGQQTEFKILSLHPGQKYLVQVRCKPDHGYWSAWSPATFIQIPSDFTMND

SEQ ID NO: 318 - protein, 467 aa, Artificial
  synthesized prolactin fusion protein
MNIKGSPWKGSLLLLLVSNLLLCQSVAPLPICPGGAARCQVTLRDLFDRAVVLSHYIHNLSSEMFSEFDKRYTHGRGFITKAINSCHTSSLATPEDKEQAQQMNQKDFLSLIVSILRSWNEPLYHLVTEVRGMQEAPEAILSKAVEIEEQTKRLLERMELIVSQVHPETKENEIYPVWSGLPSLQMADEESRLSAYYNLLHCLRRDSHKIDNYLKLLKCRIIHNNNCGGGGSGGGGSGGGGSGGNGTGGGGSGGGGSQLPPGKPEIFKCRSPNKETFTCWWRPGTDGGLPTNYSLTYHREGETLMHECPDYITGGPNSCHFGKQYTSMWRTYIMMVNATNQMGSSFSDELYVDVTYIVQPDPPLELAVEVKQPEDRKPYLWIKWSPPTLIDLKTGWFTLLYEIRLKPEKAAEWEIHFAGQQTEFKILSLHPGQKYLVQVRCKPDHGYWSAWSPATFIQIPSDFTMND

SEQ ID NO: 319 - protein, 458 aa, Artificial
  synthesized prolactin fusion protein
MNIKGSPWKGSLLLLLVSNLLLCQSVAPRSQVTLRDLFDRAVVLSHYIHNLSSEMFSEFDKRYTHGRGFITKAINSCHTSSLATPEDKEQAQQMNQKDFLSLIVSILRSWNEPLYHLVTEVRGMQEAPEAILSKAVEIEEQTKRLLERMELIVSQVHPETKENEIYPVWSGLPSLQMADEESRLSAYYNLLHCLRRDSHKIDNYLKLLKCRIIHNNNCGGGGSGGGGSGGGGSGGNGTGGGGSGGGGSQLPPGKPEIFKCRSPNKETFTCWWRPGTDGGLPTNYSLTYHREGETLMHECPDYITGGPNSCHFGKQYTSMWRTYIMMVNATNQMGSSFSDELYVDVTYIVQPDPPLELAVEVKQPEDRKPYLWIKWSPPTLIDLKTGWFTLLYEIRLKPEKAAEWEIHFAGQQTEFKILSLHPGQKYLVQVRCKPDHGYWSAWSPATFIQIPSDFTMND

SEQ ID NO: 320 - protein, 467 aa, Artificial
  synthesized prolactin fusion protein
MNIKGSPWKGSLLLLLVSNLLLCQSVAPLPICPGGAARCQVTLRDLFDRAVVLSHYIHNLSSEMFSEFDKRYTHGRGFITKAINSCHTSSLATPEDKEQAQQMNQKDFLSLIVSILRSWNEPLYHLVTEVRGMQEAPEAILSKAVEIEEQTKRLLEGMELIVSQVHPETKENEIYPVWSGLPSLQMADEESRLSAYYNLLHCLRRDSHKIDNYLKLLKCRIIHNNNCGGGGSGGGGSGGGGSGWNGSGGGGSGGGGSQLPPGKPEIFKCRSPNKETFTCWWRPGTDGGLPTNYSLTYHREGETLMHECPDYITGGPNSCHFGKQYTSMWRTYIMMVNATNQMGSSFSDELYVDVTYIVQPDPPLELAVEVKQPEDRKPYLWIKWSPPTLIDLKTGWFTLLYEIRLKPEKAAEWEIHFAGQQTEFKILSLHPGQKYLVQVRCKPDHGYWSAWSPATFIQIPSDFTMND

SEQ ID NO: 321 - protein, 467 aa, Artificial
  synthesized prolactin fusion protein
MNIKGSPWKGSLLLLLVSNLLLCQSVAPLPICPGGAARCQVTLRDLFDRAVVLSHYIHNLSSEMFSEFDKRYTHGRGFITKAINSCHTSSLATPEDKEQAQQMNQKDFLSLIVSILRSWNEPLYHLVTEVRGMQEAPEAILSKAVEIEEQTKRLLERMELIVSQVHPETKENEIYPVWSGLPSLQMADEESRLSAYYNLLHCLRRDSHKIDNYLKLLKCRIIHNNNCGGGGSGGGGSGGGGSGWNGSGGGGSGGGGSQLPPGKPEIFKCRSPNKETFTCWWRPGTDGGLPTNYSLTYHREGETLMHECPDYITGGPNSCHFGKQYTSMWRTYIMMVNATNQMGSSFSDELYVDVTYIVQPDPPLELAVEVKQPEDRKPYLWIKWSPPTLIDLKTGWFTLLYEIRLKPEKAAEWEIHFAGQQTEFKILSLHPGQKYLVQVRCKPDHGYWSAWSPATFIQIPSDFTMND

SEQ ID NO: 322 - protein, 458 aa, Artificial
  synthesized prolactin fusion  protein
MNIKGSPWKGSLLLLLVSNLLLCQSVAPRSQVTLRDLFDRAVVLSHYIHNLSSEMFSEFDKRYTHGRGFITKAINSCHTSSLATPEDKEQAQQMNQKDFLSLIVSILRSWNEPLYHLVTEVRGMQEAPEAILSKAVEIEEQTKRLLERMELIVSQVHPETKENEIYPVWSGLPSLQMADEESRLSAYYNLLHCLRRDSHKIDNYLKLLKCRIIHNNNCGGGGSGGGGSGGGGSGWNGSGGGGSGGGGSQLPPGKPEIFKCRSPNKETFTCWWRPGTDGGLPTNYSLTYHREGETLMHECPDYITGGPNSCHFGKQYTSMWRTYIMMVNATNQMGSSFSDELYVDVTYIVQPDPPLELAVEVKQPEDRKPYLWIKWSPPTLIDLKTGWFTLLYEIRLKPEKAAEWEIHFAGQQTEFKILSLHPGQKYLVQVRCKPDHGYWSAWSPATFIQIPSDFTMND

SEQ ID NO: 323 - protein, 470 aa, Artificial
  synthesized prolactin fusion protein
MNIKGSPWKGSLLLLLVSNLLLCQSVAPLPICPGGAARCQVTLRDLFDRAVVLSHYIHNLSSEMFSEFDKRYTHGRGFITKAINSCHTSSLATPEDKEQAQQMNQKDFLSLIVSILRSWNEPLYHLVTEVRGMQEAPEAILSKAVEIEEQTKRLLEGMELIVSQVHPETKENEIYPVWSGLPSLQMADEESRLSAYYNLLHCLRRDSHKIDNYLKLLKCRIIHNNNCGGGGSGGGGSGGGGSGGGGSNATGGGGSGGGGSQLPPGKPEIFKCRSPNKETFTCWWRPGTDGGLPTNYSLTYHREGETLMHECPDYITGGPNSCHFGKQYTSMWRTYIMMVNATNQMGSSFSDELYVDVTYIVQPDPPLELAVEVKQPEDRKPYLWIKWSPPTLIDLKTGWFTLLYEIRLKPEKAAEWEIHFAGQQTEFKILSLHPGQKYLVQVRCKPDHGYWSAWSPATFIQIPSDFTMND

SEQ ID NO: 324 - protein, 470 aa, Artificial [sequence omitted]

SEQ ID NO: 325 - protein, 461 aa, Artificial
  synthesized prolactin fusion protein
MNIKGSPWKGSLLLLLVSNLLLCQSVAPRSQVTLRDLFDRAVVLSHYIHNLSSEMFSEFDKRYTHGRGFITKAINSCHTSSLATPEDKEQAQQMNQKDFLSLIVSILRSWNEPLYHLVTEVRGMQEAPEAILSKAVEIEEQTKRLLERMELIVSQVHPETKENEIYPVWSGLPSLQMADEESRLSAYYNLLHCLRRDSHKIDNYLKLLKCRIIHNNNCGGGGSGGGGSGGGGSGGGGSNATGGGGSGGGGSQLPPGKPEIFKCRSPNKETFTCWWRPGTDGGLPTNYSLTYHREGETLMHECPDYITGGPNSCHFGKQYTSMWRTYIMMVNATNQMGSSFSDELYVDVTYIVQPDPPLELAVEVKQPEDRKPYLWIKWSPPTLIDLKTGWFTLLYEIRLKPEKAAEWEIHFAGQQTEFKILSLHPGQKYLVQVRCKPDHGYWSAWSPATFIQIPSDFTMND

SEQ ID NO: 326 - protein, 391 aa, Homo sapiens; identical to SEQ ID NO: 16

SEQ ID NO: 327 - protein, 695 aa, Homo sapiens [sequence omitted]

SEQ ID NO: 328 - protein, 699 aa, Homo sapiens [sequence omitted]

SEQ ID NO: 329 - protein, 764 aa, Homo sapiens; identical to SEQ ID NO: 23

SEQ ID NO: 330 - protein, 5 aa, artificial
  synthesized peptide linker molecule
SSSSG

SEQ ID NO: 331 - protein, 5 aa, Artificial
  synthesized glycine peptide linker
GGGGS

SEQ ID NO: 332 - protein, 14 aa, Homo sapiens
AGCKNFFWKTFTSC

SEQ ID NO: 333 - protein, 28 aa, Homo sapiens
SANSNPAMAPRERKAGCKNFFWKTFTSC

SEQ ID NO: 334 - protein, 5 aa, Artificial
  synthesized glycosylation motif
  misc_feature (1)..(5): glycosylation motif compries Asn-Xaa-Ser or Asn-Xaa-Thr
XXXXX

SEQ ID NO: 335 - protein, 5 aa, Artificial
  synthesized
  misc_feature (2)..(2): Xaa is any naturally occurring amino acid except proline
  misc_feature (4)..(5): Xaa is any naturally occurring amino acid except proline
NXSXX

SEQ ID NO: 336 - protein, 5 aa, Artificial
  synthesized
  misc_feature (1)..(1): Xaa is any naturally occurring amino acid except proline
  misc_feature (3)..(3): Xaa is any naturally occurring amino acid except proline
  misc_feature (5)..(5): Xaa is any naturally occurring amino acid except proline
XNXSX

SEQ ID NO: 337 - protein, 5 aa, Artificial
  synthesized
  misc_feature (1)..(2): Xaa is any naturally occurring amino acid except proline
  misc_feature (4)..(4): Xaa is any naturally occurring amino acid except proline
XXNXS

SEQ ID NO: 338 - protein, 5 aa, Artificial
  synthesized
  misc_feature (2)..(2): Xaa is any naturally occurring amino acid except proline
  misc_feature (4)..(5): Xaa is any naturally occurring amino acid except proline
NXTXX

SEQ ID NO: 339 - protein, 5 aa, Artificial
  synthesized
  misc_feature (1)..(1): Xaa is any naturally occurring amino acid except proline
  misc_feature (3)..(3): Xaa is any naturally occurring amino acid except proline
  misc_feature (5)..(5): Xaa is any naturally occurring amino acid except proline
XNXTX

SEQ ID NO: 340 - protein, 5 aa, Artificial
  synthesized
  misc_feature (1)..(2): Xaa is any naturally occurring amino acid except proline
  misc_feature (4)..(4): Xaa is any naturally occurring amino acid except proline
XXNXT

SEQ ID NO: 341 - protein, 5 aa, Artificial
  synthesized
  misc_feature (2)..(2): Xaa is any naturally occurring amino acid except proline
NXSGS

SEQ ID NO: 342 - protein, 5 aa, Artificial
  synthesized
  misc_feature (3)..(3): Xaa is any naturally occurring amino acid except proline
GNXSS

SEQ ID NO: 343 - protein, 5 aa, Artificial
  synthesized
  misc_feature (4)..(4): Xaa is any naturally occurring amino acid except proline
GGNXS

SEQ ID NO: 344 - protein, 5 aa, Artificial
  synthesized
  misc_feature (2)..(2): Xaa is any naturally occurring amino acid except proline
NXTGS

SEQ ID NO: 345 - protein, 5 aa, Artificial
  synthesized
  misc_feature (3)..(3): Xaa is any naturally occurring amino acid except proline
GNXTS

SEQ ID NO: 346 - protein, 5 aa, Artificial
  synthesized
  misc_feature (4)..(4): Xaa is any naturally occurring amino acid except proline
GGNXT

SEQ ID NO: 347 - protein, 5 aa, Artificial
  synthesized
  misc_feature (2)..(2): Xaa is any naturally occurring amino acid except proline
NXSSG

SEQ ID NO: 348 - protein, 5 aa, Artificial
  synthesized
  misc_feature (3)..(3): Xaa is any naturally occurring amino acid except proline
SNXSG

SEQ ID NO: 349 - protein, 5 aa, Artificial
  synthesized
  misc_feature (3)..(3): Xaa is any naturally occurring amino acid except proline
SNXSG

SEQ ID NO: 350 - protein, 5 aa, Artificial
  synthesized
  misc_feature (4)..(4): Xaa is any naturally occurring amino acid except proline
SSNXS

SEQ ID NO: 351 - protein, 5 aa, Artificial
  synthesized
  misc_feature (2)..(2): Xaa can be any naturally occurring amino acid
NXTSG

SEQ ID NO: 352 - protein, 5 aa, Artificial
  synthesized
  misc_feature (3)..(3): Xaa is any naturally occurring amino acid except proline
SNXTG

SEQ ID NO: 353 - protein, 5 aa, Artificial
  synthesized
  misc_feature (4)..(4): Xaa is any naturally occurring amino acid except proline
SSNXT
